(19) United States
(12) Patent Application Publication
(10) Pub. No.: US 2020/0248169 A1
(43) Pub. Date: Aug. 6, 2020

(54) CRISPR/CAS-CYTIDINE DEAMINASE BASED COMPOSITIONS, SYSTEMS, AND METHODS FOR TARGETED NUCLEIC ACID EDITING

(71) Applicants: THE BROAD INSTITUTE, INC., Cambridge, MA (US); MASSACHUSETTS INSTITUTE OF TECHNOLOGY, Cambridge, MA (US); PRESIDENT AND FELLOWS OF HARVARD COLLEGE, Cambridge, MA (US)

(72) Inventors: Feng Zhang, Cambridge, MA (US); Jonathan Gootenberg, Cambridge, MA (US); David Benjamin Turitz Cox, Cambridge, MA (US); Omar Abudayyeh, Cambridge, MA (US); Soumya Kannan, Cambridge, MA (US)

(73) Assignees: THE BROAD INSTITUTE, INC., Cambridge, MA (US); MASSACHUSETTS INSTITUTE OF TECHNOLOGY, Cambridge, MA (US); PRESIDENT AND FELLOWS OF HARVARD COLLEGE, Cambridge, MA (US)

(21) Appl. No.: 16/623,799

(22) PCT Filed: Jun. 26, 2018
(86) PCT No.: PCT/US2018/039618

§ 371 Date: Dec. 18, 2019

Related U.S. Application Data
(60) Provisional application No. 62/525,184, filed on Jun. 26, 2017.
(60) Provisional application No. 62/528,396, filed on Jul. 3, 2017.
(60) Provisional application No. 62/534,063, filed on Jul. 18, 2017.
(60) Provisional application No. 62/591,564, filed on Nov. 28, 2017.

(51) Int. Cl. C12N 15/10; C12N 9/22; C12N 9/78

(52) U.S. Cl. CPC C12N 15/102; C12N 9/22; C12N 2310/20; C12Y 305/04005; C12N 9/78

(57) ABSTRACT

The invention provides for systems, methods, and compositions for targeting and editing nucleic acids. In particular, the invention provides non-naturally occurring or engineered RNA-targeting systems comprising a RNA-targeting Cas13 protein, at least one guide molecule, and at least one cytidine deaminase protein or catalytic domain thereof.

### CROSS-REFERENCE TO RELATED APPLICATIONS

[0001] This application claims the benefit of U.S. Provisional Application No. 62/525,184, fled Jun. 26, 2017, U.S. Provisional Application No. 62/528,396, filed Jul. 3, 2017, U.S. Provisional Application No. 62/534,063, filed Jul. 18, 2017, and U.S. Provisional Application No. 62/591,564, filed Nov. 28, 2017. The entire contents of the above-identified applications are hereby fully incorporated herein by reference.

### STATEMENT AS TO FEDERALLY SPONSORED RESEARCH

[0002] This invention was made with government support under grant numbers MH100706, MH110049, and HL141201 awarded by the National Institutes of Health. The government has certain rights in the invention

### REFERENCE TO DOCUMENTS CO-FILED IN COMPUTER READABLE FORMAT

[0003] An ASCII compliant text file entitled “Clin_var_pathogenic_SNPS_TC.txt” created on Jul. 3, 2017 and 891043 bytes in size is filed herewith via EFS-WEB, the contents of which are hereby incorporated herein by reference.

### FIELD OF THE INVENTION

[0004] The present invention generally relates to systems, methods, and compositions for targeting and editing nucleic acids, in particular for programmable deamination of cytosine at a target RNA.

### BACKGROUND

[0005] Recent advances in genome sequencing techniques and analysis methods have significantly accelerated the ability to catalog and map genetic factors associated with a diverse range of biological functions and diseases. Precise genome targeting technologies are needed to enable systematic reverse engineering of causal genetic variations by allowing selective perturbation of individual genetic elements, as well as to advance synthetic biology, biotechnological, and medical applications. Although genome-editing techniques such as designer zinc fingers, transcription activator-like effectors (TALEs), or homing meganucleases are available for producing targeted genome perturbations, there remains a need for new genome engineering technologies that employ novel strategies and molecular mechanisms and are affordable, easy to set up, scalable, and amenable to targeting multiple positions within the eukaryotic genome. This would provide a major resource for new applications in genome engineering and biotechnology.

[0006] Point mutations A→G and T(U)→C represent about 12% of known pathogenic SNPs. Programmable deamination of cytosine has been reported and may be used for correction of A→G and T(U)→C point mutations. For example, Komor et al., Nature (2016) 533:420-424 reports targeted deamination of cytosine by APOBEC1 cytidine deaminase in a non-targeted DNA stranded displaced by the binding of a Cas9-guide RNA complex to a targeted DNA strand, which results in conversion of cytosine to uracil. See also Kim et al., Nature Biotechnology (2017) 35:371-376; Shimatani et al., Nature Biotechnology (2017) doi:10.1038/nbt.3833; Zong et al., Nature Biotechnology (2017) doi:10.1038/nbt.3811; Yang Nature Communication (2016) doi:10.1038/ncomms13330.

[0007] Novel systems and methods which allow specific correction of these point mutations and pathogenic SNPs, in particular at the RNA level instead of at the DNA level, are of interest.

### SUMMARY OF THE INVENTION

[0008] At least a first aspect of the invention relates to a method of modifying an Cytosine in a target RNA, the method comprising delivering to the locus: (a) a catalytically inactive Cas13 protein; (b) a guide molecule which comprises a guide sequence linked to a direct repeat sequence; and (c) a cytidine deaminase protein or catalytic domain thereof; wherein said cytidine deaminase protein or catalytic domain thereof is covalently or non-covalently linked to said catalytically inactive Cas13 protein or said guide molecule or is adapted to link thereto after delivery; wherein said guide molecule forms a complex with said catalytically inactive Cas13 and directs said complex to bind said target RNA, wherein said guide sequence is capable of hybridizing with a target sequence within said target RNA to form an RNA duplex; wherein: (A) said Cytosine is outside said target sequence that forms said RNA duplex, wherein said cytidine deaminase protein or catalytic domain thereof deaminates said Cytosine outside said RNA duplex, or (B) said Cytosine is within said target sequence that forms said RNA duplex, wherein said guide sequence comprises a non-pairing Adenine or Uracil at a position corresponding to said Cytosine resulting in a C-A or C-U mismatch in said RNA duplex, and wherein the cytidine deaminase protein or catalytic domain thereof deaminates the Cytosine in the RNA duplex opposite to the non-pairing Adenine or Uracil.

[0009] In some embodiments, the cytidine deaminase protein or catalytic domain thereof is fused to N- or C-terminus of the catalytically inactive Cas13 protein. In some embodiments, the cytidine protein or catalytic domain thereof is fused to the catalytically inactive Cas13 protein by a linker. In some embodiments, the linker is (GGGGS)₃₋₁₁ (SEQ ID Nos. 1-9), GSG₅ (SEQ ID Nos. 10) or LEPGEKPYKCPECGKSFSQSGALTRHQRTHTR (SEQ ID No. 11).

[0010] In some embodiments, the cytidine deaminase protein or catalytic domain thereof is linked to an adaptor protein and the guide molecule or the catalytically inactive Cas13 protein comprises an aptamer sequence capable of binding to the adaptor protein. In some embodiments, the adaptor sequence is selected from MS2, PP7, Qβ, F2, GA, fr, JP501, M12, R17, BZ13, JP34, JP500, KU1, M11, MX1, TW18, VK, SP, FI, ID2, NL95, TW19, AP205, ϕCb5, ϕCb8r, ϕ12r, ϕCb23r, 7s and PRR1.

[0011] In some embodiments, the cytidine deaminase protein or catalytic domain thereof is inserted into an internal loop of the catalytically inactive Cas13 protein.

[0012] In some embodiments, the catalytically inactive Cas13 protein comprises a mutation in the HEPN domain. In some embodiments, the catalytically inactive Cas13 protein has at least part of the HEPN domain removed.

[0013] In some embodiments, the catalytically inactive Cas13 protein is a Cas13a/C2c2, Cas13b, or Cas13c protein.

[0014] In some embodiments, the catalytically inactive Cas13 protein is obtained from a Cas13a nuclease derived from a bacterial species selected from the group consisting of Leptotrichia shahii, Lachnospiraceae bacterium, Lachnospiraceae bacterium, Clostridium aminophilum, Carnobacterium gallinarum, Paludibacter propionicigenes, Listeria weihenstephanensis, Listeriaceae bacterium, Listeria newyorkensis, Leptotrichia wadei, Rhodobacter capsulatus, Rhodobacter capsulatus, Rhodobacter capsulatus, Leptotrichia wadei, or Listeria seeligeri.

[0015] In some embodiments, the catalytically inactive Cas13 protein is obtained from a Cas13b nuclease derived from a bacterial species selected from the group consisting of Porphyromonas gulae, Prevotella sp., Porphyromonas gingivalis, Bacteroides pyogenes, Riemerella anatipestifer, Bergeyella zoohelcum, Prevotella intermedia, Prevotella buccae, Alistipes sp., Prevotella aurantiaca, Myroides odoratimimus, Capnocytophaga canimorsus, Flavobacterium branchiophilum, and Flavobacterium columnare.

[0016] In some embodiments, the catalytically inactive Cas13 protein has been modified to and recognizes an altered PAM sequence.

[0017] In some embodiments, the guide molecule binds to the catalytically inactive Cas13 protein and is capable of forming a RNA duplex of about 15-30 nt with the target sequence. In some embodiments, the guide molecule binds to the catalytically inactive Cas13 protein and is capable of forming a RNA duplex of more than 30 nt with the target sequence.

[0018] In some embodiments, the guide sequence of the guide molecule comprises at least one further mismatches or non-pairing nucleotide with the target sequence, adjacent to said non-pairing Adenine or Uracil. In some embodiments, the guide sequence comprises a stretch of three to five consecutive mismatches with the target sequence. In some embodiments the guide sequence comprises less than 6 consecutive mismatches with the target sequence.

[0019] In some embodiments, the guide sequence comprises at least one further non-pairing nucleotide with said target sequence, adjacent to said non-pairing Adenine or Uracil. In some embodiments, the guide sequence comprises a stretch of three to five consecutive non-pairing nucleotides with said target sequence.

[0020] In some embodiments, the cytidine deaminase is a human, rat or lamprey cytidine deaminase. In some embodiments, the cytidine deaminase is an apolipoprotein B mRNA-editing complex (APOBEC) family deaminase, an activation-induced deaminase (AID), or a cytidine deaminase 1 (CDA1).

[0021] In some embodiments, the cytidine deaminase is an APOBEC1 deaminase comprising one or more mutations corresponding to W90A, W90Y, R118A, H121R, H122R, R126A, R126E, or R132E in rat APOBEC1, or an APOBEC3G deaminase comprising one or more mutations corresponding to W285A, W285Y, R313A, D316R, D317R, R320A, R320E, or R326E in human APOBEC3 G.

[0022] In some embodiments, the target RNA is within a cell. In some embodiments, the cell is a eukaryotic cell. In some embodiments, the cell is a non-human animal cell. In some embodiments, the cell is a human cell. In some embodiments, the cell is a plant cell.

[0023] In some embodiments, the target RNA is within an animal. In some embodiments, the target RNA is within a plant. In some embodiments, the target RNA is comprised in a DNA molecule in vitro.

[0024] In some embodiments, the components (a), (b) and (c) are delivered to the cell as a ribonucleoprotein complex.

[0025] In some embodiments, the components (a), (b) and (c) are delivered to the cell as one or more polynucleotide molecules. In some embodiments, the one or more polynucleotide molecules comprise one or more mRNA molecules encoding components (a) and/or (c).

[0026] In some embodiments, the one or more polynucleotide molecules are comprised within one or more vectors. In some embodiments, the one or more polynucleotide molecules comprise one or more regulatory elements operably configured to express the catalytically inactive Cas13 protein, the guide molecule, and the cytidine deaminase protein or catalytic domain thereof, optionally wherein the one or more regulatory elements comprise inducible promoters.

[0027] In some embodiments, the catalytically inactive Cas13 protein and optionally the cytidine deaminase protein or catalytic domain thereof comprise one or more heterologous nuclear export signal(s) (NES(s)).

[0028] In some embodiments, the cytidine deaminase is delivered together with a uracil glycosylase inhibitor (UGI), where the UGI is covalently linked to said cytidine deaminase and/or said catalytically inactive Cas13.

[0029] In some embodiments, the one or more polynucleotide molecules or the ribonucleoprotein complex are delivered via particles, vesicles, or one or more viral vectors.

[0030] In some embodiments, the particles comprise a lipid, a sugar, a metal or a protein. In some embodiments, the particles comprise lipid nanoparticles.

[0031] In some embodiments, the vesicles comprise exosomes or liposomes. In some embodiments, the one or more viral vectors comprise one or more of adenovirus, one or more lentivirus or one or more adeno-associated virus.

[0032] In some embodiments, the method modifies a cell, a cell line or an organism by manipulation of one or more target sequences at genomic loci of interest.

[0033] At least a second aspect of the invention relates to a method for treating or preventing a disease using the method described herein, wherein the deamination of the Cytosine at the target RNA remedies a disease caused by a T(U)→C or A→G point mutation or pathogenic SNP.

[0034] At least a third aspect of the invention relates to a method for knock-out or knock-down an undesirable activity of a gene, wherein the deamination of the Cytosine at the target RNA inactivates a target gene transcript.

[0035] At least a fourth aspect of the invention relates to a modified cell obtained from the method described above, or progeny thereof, wherein the cell comprises an Uracil or a Thymine in replace of the Cytosine in the target RNA compared to a corresponding cell not subjected to the method.

[0036] In some embodiments, the modified cell is a eukaryotic cell. In some embodiments, the modified cell is an animal cell. In some embodiments, the modified cell is a human cell. In some embodiments, the modified cell is a plant cell.

[0037] In some embodiments, the modified cell is a therapeutic T cell. In some embodiments, the modified cell is an antibody-producing B cell.

[0038] At least a fifth aspect of the invention relates to a non-human animal or a plant comprising the modified cell described herein.

[0039] At least a sixth aspect of the invention relates to a method for cell therapy, comprising administering to a patient in need thereof the modified cell described herein, wherein the presence of the modified cell remedies a disease in the patient.

[0040] At least a seventh aspect of the invention relates to an engineered, non-naturally occurring system suitable for modifying an Cytosine in a target RNA, comprising: a guide molecule which comprises a guide sequence linked to a direct repeat, or a nucleotide sequence encoding the guide molecule; a catalytically inactive Cas13 protein, or one or more nucleotide sequences encoding the catalytically inactive Cas13 protein; a cytidine deaminase protein or catalytic domain thereof, or one or more nucleotide sequences encoding; wherein said cytidine deaminase protein or catalytic domain thereof is covalently or non-covalently linked to said catalytically inactive Cas13 protein or said guide molecule or is adapted to link thereto after delivery; wherein said guide sequence is capable of hybridizing with a target sequence within said target RNA to form an RNA duplex; wherein: (A) said Cytosine is outside said target sequence that forms said RNA duplex, or (B) said Cytosine is within said target sequence that forms said RNA duplex and wherein said guide sequence comprises a non-pairing Adenine or Uracil at a position corresponding to said Cytosine resulting in a C-A or C-U mismatch in said RNA duplex. Accordingly, the application provides kits comprising or consisting of the components of the CD-functionalized CRISPR system described herein.

[0041] At least an eighth aspect of the invention relates to an engineered, non-naturally occurring vector system suitable for modifying an Cytosine in a target RNA, comprising one or more vectors comprising: a first regulatory element operably linked to one or more nucleotide sequences encoding a guide molecule which comprises a guide sequence linked to a direct repeat; a second regulatory element operably linked to a nucleotide sequence encoding a catalytically inactive Cas13 protein; and optionally a nucleotide sequence encoding a cytidine deaminase protein protein or catalytic domain thereof which is under control of the first or second regulatory element or operably linked to a third regulatory element; wherein, if the nucleotide sequence encoding a cytidine deaminase protein or catalytic domain thereof is operably linked to a third regulatory element, the cytidine deaminase protein or catalytic domain thereof is adapted to link to the guide molecule or the catalytically inactive Cas13 protein after expression; wherein components (a), (b) and (c) are located on the same or different vectors of the system. Accordingly, the application provides kits comprising or consisting of vectors encoding of the components of the CD-functionalized CRISPR system described herein.

[0042] At least a ninth aspect of the invention relates to in vitro, ex vivo or in vivo host cell or cell line or progeny thereof comprising the engineered, non-naturally occurring system or vector system described herein.

[0043] In some embodiments, the host cell is a eukaryotic cell. In some embodiments, the host cell is an animal cell. In some embodiments, the host cell is a human cell. In some embodiments, the host cell is a plant cell.

[0044] In another aspect, the invention is directed to an engineered composition for site-directed base editing comprising a targeting domain and a cytodine deaminase, or catalytic domain thereof. In particular embodiments, the targeting domain is an oligonucleotide binding domain. In particular embodiments, the cytodine deaminase, or catalytic domain thereof, comprises one or more mutations that increase activity or specificity of the cytodine deaminase relative to wild type. In particular embodiments, the targeting domain is a CRISPR system comprising a CRISPR effector protein, or functional domain thereof, and a guide molecule, more particularly the CRISPR system is catalytically inactive. In particular embodiments, the CRISPR system comprises an RNA-binding protein, preferably Cas13, preferably the Cas13 protein is Cas13a, Cas13b or Cas13c, preferably wherein said Cas13 a Cas13 listed in any of Tables 1, 2, 3, 4, or 6 or is from a bacterial species listed in any of Tables 1, 2, 3, 4, or 6, preferably wherein said Cas13 protein is Prevotella sp. P5-125 Cas13b, Porphyromas gulae Cas13b, or Riemerella anatipestifer Cas13b; preferably Prevotella sp. P5-125 Cas13b. In particular embodiments, the Cas13 protein is a Cas13a protein and said Cas13a comprises one or more mutations the two HEPN domains, particularly at position R474 and R1046 of Cas13a protein originating from Leptotrichia wadei or amino acid positions corresponding thereto of a Cas13a ortholog, or wherein said Cas13 protein is a Cas13b protein and said Cas13b comprises a mutation in one or more of positions R116, H121, R1177, H1182, preferably R116A, H121A, R1177A, H1182A of Cas13b protein originating from Bergeyella zoohelcum ATCC 43767 or amino acid positions corresponding thereto of a Cas13b ortholog, or wherein said Cas13 protein is a Cas13b protein and said Cas13b comprises a mutation in one or more of positions R128, H133, R1053, H1058, preferably H133 and H1058, preferably H133A and H1058A, of a Cas13b protein originating from Prevotella sp. P5-125 or amino acid positions corresponding thereto of a Cas13b ortholog as described elsewhere herein or the Cas 13 is truncated, preferably C-terminally truncated, preferably wherein said Cas13 is a truncated functional variant of the corresponding wild type Cas13, optionally wherein said truncated Cas13b is encoded by nt 1-984 of Prevotella sp. P5-125 Cas13b or the corresponding nt of a Cas13b orthologue or homologue.

[0045] In particular embodiments, the guide molecule of the targeting domain comprises a guide sequence is capable of hybridizing with a target RNA sequence comprising a Cytodine to form an RNA duplex, wherein said guide sequence comprises a non-pairing adenosine or uracil at a position corresponding to said Cytodine resulting in a mismatch in the RNA duplex formed. In particular embodiments, the guide sequence has a length of about 20-53 nt, preferably 25-53 nt, more preferably 29-53 nt or 40-50 nt capable of forming said RNA duplex with said target sequence, and/or wherein the distance between said non-pairing C and the 5′ end of said guide sequence is 20-30 nucleotides. In particular embodiments, the guide sequence comprises more than one mismatch corresponding to different adenosine sites in the target RNA sequence or wherein two guide molecules are used, each comprising a mismatch corresponding to a different adenosine sites in the target RNA sequence.

[0046] In particular embodiments, of the composition the cytodine deaminase protein or catalytic domain thereof is fused to a N- or C-terminus of said oligonucleotide targeting protein, optionally by a linker as described elsewhere herein. Alternatively, said cytodine deaminase protein or catalytic domain thereof is inserted into an internal loop of said dead Cas13 protein. In a further alternative embodiment, the cytodine deaminase protein or catalytic domain thereof is linked to an adaptor protein and said guide molecule or said dead Cas13 protein comprises an aptamer sequence capable of binding to said adaptor protein as described elsewhere herein.

[0047] In particular embodiments of the composition the cytodine deaminase protein or catalytic domain thereof capable of deaminating cytodine in RNA or is an RNA specific cytodine deaminase. In further particular embodiments, the deaminase protein comprises one or more mutations, more particularly the one or more mutations comprise mutations at one or more amino acid residues described herein.

[0048] In particular embodiments of the composition, the targeting domain and optionally the cytodine deaminse or catalytic domain thereof comprise one or more heterologous nuclear export signal(s) (NES(s)) or nuclear localization signal(s) (NLS(s)), preferably an HIV Rev NES or MAPK NES, preferably C-terminal.

[0049] A further aspect of the invention relates to the composition as envisaged herein for use in prophylactic or therapeutic treatment, preferably wherein said target locus of interest is within a human or animal and to methods of modifying a Cytidine in a target RNA sequence of interest, comprising delivering to said target RNA, the composition as described hereinabove. In particular embodiments, the CRISPR system and the cytodine deaminase, or catalytic domain thereof, are delivered as one or more polynucleotide molecules, as a ribonucleoprotein complex, optionally via particles, vesicles, or one or more viral vectors. In particular embodiments, the composition is for use in the treatment or prevention of a disease caused by transcripts containing a pathogenic A→G or T→C point mutation. In particular embodiments, the invention thus comprises compositions for use in therapy. This implies that the methods can be performed in vivo, ex vivo or in vitro. In particular embodiments, the methods are not methods of treatment of the animal or human body or a method for modifying the germ line genetic identity of a human cell. In particular embodiments; when carrying out the method, the target RNa is not comprised within a human or animal cell. In particular embodiments, when the target is a human or animal target, the method is carried out ex vivo or in vitro

[0050] A further aspect relates to an isolated cell obtained or obtainable from the methods described above and/or comprising the composition described above or progeny of said modified cell, preferably wherein said cell comprises a hypoxanthine or a guanine in replace of said Cytodine in said target RNA of interest compared to a corresponding cell not subjected to the method. In particular embodiments, the cell is a eukaryotic cell, preferably a human or non-human animal cell, optionally a therapeutic T cell or an antibody-producing B-cell or wherein said cell is a plant cell. A further aspect provides a non-human animal or a plant comprising said modified cell or progeny thereof. Yet a further aspect provides the modified cell as described hereinabove for use in therapy, preferably cell therapy.

### BRIEF DESCRIPTION OF THE DRAWINGS

[0051] FIG. 1: (A) Schematic illustration of reactivation of start codon in Cypridina luciferase. (B) guide design. (SEQ ID Nos. 12-14)

[0052] FIG. 2: Mammalian codon-optimized Cas13b orthologs mediate highly efficient RNA knockdown. (A) Schematic of representative Cas13a, Cas13b, and Cas13c loci and associated crRNAs. (SEQ ID Nos. 15-36) (B) Schematic of luciferase assay to measure Cas13a cleavage activity in HEK293FT cells. (C) RNA knockdown efficiency using two different guides targeting Cluc with 19 Cas13a, 15 Cas13b, and 5 Cas13c orthologs. Luciferase expression is normalized to the expression in non-targeting guide control conditions. (D) The top 7 orthologs performing in part C are assayed for activity with three different NLS and NES tags with two different guide RNAs targeting Cluc. (E) Cas13b12 and Cas13a2 (LwCas13a) are compared for knockdown activity against Gluc and Cluc. Guides are tiled along the transcripts and guides between Cas13b12 and Cas13a2 are position matched. (F) Guide knockdown for Cas13a2, Cas13b6, Cas13b11, and Cas13b12 against the endogenous KRAS transcript and are compared against corresponding shRNAs.

[0053] FIG. 3: Cas13 enzymes mediate specific RNA knockdown in mammalian cells. (A) Schematic of semi-degenerate target sequences for Cas13a/b mismatch specificity testing. (B) Heatmap of single mismatch knockdown data for Cas13 a/b. Knockdown is normalized to non-targeting (NT) guides for each enzyme. (C) Double mismatch knockdown data for Cas13a. The position of each mismatch is indicated on the X and Y axes. Knockdown data is the sum of all double mismatches for a given set of positions. Data is normalized to NT guides for each enzyme. (D) Double mismatch knockdown data for Cas13b. See C for description. (E) RNA-seq data comparing transcriptome-wide specificity for Cas13 a/b and shRNA for position-matched guides. The Y axis represents read counts for the targeting condition and the X axis represents counts for the non-targeting condition. (F) RNA expression as calculated from RNA-seq data for Cas13 a/b and shRNA. (G) Significant off-targets for Cas13 a/b and shRNA from RNA-seq data. Significant off-targets were calculated using FDR <0.05.

[0054] FIG. 4: Development of Cas13b-APOBEC fusions for RNA C->U editing. (A) Schematic of the luciferase assay to restore the start codon at the beginning of the Cluc transcript using Cas13b12-APOBEC fusions. (B) Guides downstream of the correction site are highly edited with the Cas13b12-APOBEC3A fusion as measured through restored luciferase activity.

[0055] FIG. 5: Provides results of an assay assessing guide design and cytidine deaminase function.

[0056] FIG. 6: Provides results of guide sequence designs on deaminase activity with multiple Cas13b-cytidine deaminase fusion constructs, in accordance with certain example embodiments.

[0057] FIG. 7 is a graph showing that V351G editing greatly increases REPAIR editing. The V351G mutation (pAB316) was introduced into the E488Q PspCas13b (Cas13b12) REPAIR construct (REPAIR v1, pAB0048) and tested for C-U activity on a gauss luciferase construct with a TCG motif (TCG). Editing was read out by next generation sequencing, revealing increased C-U activity.

[0058] FIG. 8 is a graph showing endogenous KRAS and PPIB targeting. The V351G mutation (pAB316) was introduced into the E488Q PspCas13b REPAIR construct (REPAIR v1, pAB0048) and tested for C-U activity on a gauss four sites, two in each gene, with different motifs. Editing was read out by next generation sequencing, revealing increased C-U activity.

[0059] FIG. 9 is a graph showing optimal V351G combination mutants. Selected sites (S486, G489) were mutagenized to all 20 possible residues and tested on a background of REPAIR [E488Q, V351G]. Constructs were tested on two luciferase motifs, TCG and GCG, and selected on the basis of luciferase activity.

[0060] FIG. 10 is a graph showing S486A and V351G combination C-to-U activity. S486A was tested against the [V351G, E488Q] background and the E488Q background on all four motifs, with luciferase activity as a readout. S486A performs better on all motifs, especially ACG and TCG.

[0061] FIG. 11 is a graph showing that S486A improves C-to-U editing across all motifs. S486A improves targeting over the [V351G, E488Q] background on all motifs, when measured by luciferase activity.

[0062] FIG. 12A is a graph showing 5486 mutants C-to-U activity with both TCG and CCG targeting. FIG. 12B is a graph showing S486 mutants C-to-U activity with CCG targeting only. S486A was tested against the [V351G, E488Q] background and the E488Q background on all four motifs, with NGS as a readout. S486A performs better on all motifs, especially ACG and TCG.

[0063] FIG. 13 is a graph showing S486A A-to-I activity. The data shows that S486A mutations maintain A-to-I activity of the previous constructs when measured on a luciferase reporter.

[0064] FIG. 14 is a graph showing S486A A-to-I off-target activity. The data shows that S486A has comparable A-to-I off-target activity when measured on a luciferase reporter.

[0065] FIG. 15A is a graph showing that targeting by S486A/V351G/E488Q (pAB493), V351G/E488Q (pAB316), and E488Q (REPAIRv1) is comparable when read out by luciferase activity (Gluc/Cluc RLU). FIG. 15B is a graph showing that targeting by S486A/V351G/E488Q (pAB493), V351G/E488Q (pAB316), and E488Q (REPAIRv1) is comparable when assayed by NGS (fraction editing).

[0066] FIG. 16A is a graph showing S486A C-to-U activity by NGS on Cluc reporter constructs.

[0067] FIG. 16B is a graph showing S486A C-to-U activity by NGS on endogenous gene PPIB.

[0068] FIG. 17 is a graph depicting identification of new T375 and K376 mutants. Selected sites (T375, K376) were mutagenized to all 20 possible residues and tested on a background of REPAIR [E488Q, V351G]. Constructs were tested on the TCG luciferase motif and selected on the basis of luciferase activity.

[0069] FIG. 18 is a graph showing that T375S has relaxed motif. T375S was tested against the [S486A,V351G, E488Q] background (pAB493), [V351G, E488Q] background (pAB316), and the E488Q background (pAB48) on all TCG and GCG motifs, with luciferase activity as a readout. T375S improves GCG motif.

[0070] FIG. 19 is a graph showing that T375S has relaxed motif. T375S was tested against the [S486A,V351G, E488Q] background (pAB493), [V351G, E488Q] background (pAB316), and the E488Q background (pAB48) on GCG motifs, with luciferase activity as a readout. T375S improves GCG motif.

[0071] FIG. 20 is a graph depicting that B6 and B11 orthologs show improved RESCUE activity. Cas13b orthologs Cas13b6 (RanCas13b) and Cas13b11 (PguCas13b) were tested with T375S mutation, and show improved activity as measured by luciferase assay. Mutations shows are on corresponding backgrounds (T375S=T375S/S486A/V351G/E448Q).

[0072] FIG. 21 is a graph showing that DNA2.0 vectors has comparable luciferase to transient transfection vectors. RESCUE vectors based off of either DNA2.0 (now Atum) constructs compared to a non-lenti vector, with Cas13b11 (PguCas13b) show improved luciferase activity. The Atum vector map (https://benchling.com/s/seq-DENgx9izDhsRTFFgy71K) has additional EES elements for expression. Mutations shows are on corresponding backgrounds (V351G=V351G/E448Q, S486A=S486A/V351G/E448Q).

[0073] FIG. 22A is a graph showing luciferase results of testing truncations validated by REPAIR (B6 Cdelta300) with RESCUE using 30 bp guides. FIG. 22B is a graph showing luciferase results of testing truncations validated by REPAIR (B6 Cdelta300) with RESCUE using 50 bp guides. The 26 mismatch distance (as measured by the 5′ end) shows the optimal activity with both full length and truncated versions).

[0074] FIG. 23A is a graph showing luciferase results of testing truncations validated by REPAIR (B11 Ndelta280) with RESCUE using 30 bp guides. FIG. 23B is a graph showing luciferase results of testing truncations validated by REPAIR (B11 Ndelta280) with RESCUE using 50 bp guides. The 26 mismatch distance (as measured by the 5′ end) shows the optimal activity with both full length and truncated versions).

[0075] FIG. 24 is a graph showing results of testing all B6 truncations. Iterative truncations were generated from the N and C termini on RanCas13b (B6), with the T375S/S486A/V351G/E448Q mutation, with optimal activity up to C-delta 200, and activity at C-delta 320. Truncations are tested on luciferase, and editing is read out as luciferase activity. Missing bars indicate no data. The pAB0642 is an untruncated N-term control, T375S/S486A/V351G/E448Q. The pAB0440 is an untruncated C-term control, E448Q. All N-term constructs, and pAB0642, have an mark NES linker. All C-term constrcuts, and pAB0440, have a HIV-NES linker.

[0076] FIG. 25 is a graph showing results of testing all B11 truncations. Iterative truncations were generated from the N and C termini on PguCas13b (B11), with the T375S/S486A/V351G/E448Q mutation. Truncations are tested on luciferase, and editing is read out as luciferase activity.

[0077] FIG. 26A is a graph showing Beta catenin modulation with REPAIR/RESCUE as measured by Beta-catenin activity via the TCF-LEF RE Wnt pathway reporter (Promega). FIG. 26B is a graph showing Beta catenin modulation with REPAIR/RESCUE as measured by the M50 Super 8× TOPFlash reporter (Addgene). Beta-catenin/Wnt pathway induction is tested by using RNA editing to remove phosphorylation sites on Beta catenin. Guides targeting beta-catenin for either REPAIR (RanCas13b ortholog, E488Q mutation) or RESCUE (RanCas13b ortholog, T375S/S486A/V351G/E448Q mutation) were tested for phenotypic activity. The T41A guide shows activity on both reporters.

[0078] FIG. 27 is a graph showing NGS results of Beta catenin modulation. NGS readouts of either A-I (A) or C-U (C) activity at targeted sites by either REPAIR (RanCas13b ortholog, E488Q mutation) or RESCUE (RanCas13b ortholog, T375S/S486A/V351G/E448Q mutation. REPAIR was used on A targets, and RESCUE was used on C targets.

[0079] FIG. 28 is a graph depicting that tiling different guides shows improved motif activity at the 30_5 mutation (mismatch is 26 nt away from the 5′ of the guide). All four motifs were tested with various tiling guides for luciferase activity. Nomenclature corresponds to distance from the 3′ end of the spacer (i.e., 26 nt mismatch is 30_5). The 26 mismatch distance (as measured by the 5′ end) shows the optimal activity with most motifs. Guides were tested with RESCUE (RanCas13b ortholog, T375 S/S486A/V351G/E448Q mutation.

[0080] FIG. 29A is a graph showing that REPAIR allows for editing residues associated with PTMs. FIG. 29B is a graph showing that RESCUE allows for editing residues associated with PTMs.

### DETAILED DESCRIPTION

### General Definitions

[0081] Unless defined otherwise, technical and scientific terms used herein have the same meaning as commonly understood by one of ordinary skill in the art to which this disclosure pertains. Definitions of common terms and techniques in molecular biology may be found in Molecular Cloning: A Laboratory Manual, 2nd edition (1989) (Sambrook, Fritsch, and Maniatis); Molecular Cloning: A Laboratory Manual, 4th edition (2012) (Green and Sambrook); Current Protocols in Molecular Biology (1987) (F. M. Ausubel et al. eds.); the series Methods in Enzymology (Academic Press, Inc.): PCR 2: A Practical Approach (1995) (M. J. MacPherson, B. D. Hames, and G. R. Taylor eds.): Antibodies, A Laboratory Manual (1988) (Harlow and Lane, eds.): Antibodies A Laboratory Manual, 2^{nd} edition 2013 (E. A. Greenfield ed.); Animal Cell Culture (1987) (R. I. Freshney, ed.); Benjamin Lewin, Genes IX, published by Jones and Bartlet, 2008 (ISBN 0763752223); Kendrew et al. (eds.), The Encyclopedia of Molecular Biology, published by Blackwell Science Ltd., 1994 (ISBN 0632021829); Robert A. Meyers (ed.), Molecular Biology and Biotechnology: a Comprehensive Desk Reference, published by VCH Publishers, Inc., 1995 (ISBN 9780471185710); Singleton et al., Dictionary of Microbiology and Molecular Biology 2nd ed., J. Wiley & Sons (New York, N.Y. 1994), March, Advanced Organic Chemistry Reactions, Mechanisms and Structure 4th ed., John Wiley & Sons (New York, N.Y. 1992); and Marten H. Hofker and Jan van Deursen, Transgenic Mouse Methods and Protocols, 2^{nd} edition (2011).

[0082] Reference is made to U.S. Provisional 62/351,662 and 62/351,803, filed on Jun. 17, 2016, U.S. Provisional 62/376,377, filed on Aug. 17, 2016, U.S. Provisional 62/410,366, filed Oct. 19, 2016, U.S. Provisional 62/432,240, filed Dec. 9, 2016, U.S. provisional 62/471,792 filed Mar. 15, 2017, and U.S. Provisional 62/484,786 filed Apr. 12, 2017. Reference is made to International PCT application PCT/US2017/038154, filed Jun. 19, 2017. Reference is made to U.S. Provisional 62/471,710, filed Mar. 15, 2017 (entitled, “Novel Cas13B Orthologues CRISPR Enzymes and Systems,” Attorney Ref: BI-10157 VP 47627.04.2149). Reference is further made to U.S. Provisional 62/432,553, filed Dec. 9, 2016, U.S. Provisional 62/456,645, filed Feb. 8, 2017, and U.S. Provisional 62/471,930, filed Mar. 15, 2017 (entitled “CRISPR Effector System Based Diagnostics,” Attorney Ref. BI-10121 BROD 0842P) and US Provisional To Be Assigned, filed Apr. 12, 2017 (entitled “CRISPR Effector System Based Diagnostics,” Attorney Ref. BI-10121 BROD 0843P)

[0083] As used herein, the singular forms “a”, “an”, and “the” include both singular and plural referents unless the context clearly dictates otherwise.

[0084] The term “optional” or “optionally” means that the subsequent described event, circumstance or substituent may or may not occur, and that the description includes instances where the event or circumstance occurs and instances where it does not.

[0085] The recitation of numerical ranges by endpoints includes all numbers and fractions subsumed within the respective ranges, as well as the recited endpoints.

[0086] The terms “about” or “approximately” as used herein when referring to a measurable value such as a parameter, an amount, a temporal duration, and the like, are meant to encompass variations of and from the specified value, such as variations of +/−10% or less, +/−5% or less, +/−1% or less, and +/−0.1% or less of and from the specified value, insofar such variations are appropriate to perform in the disclosed invention. It is to be understood that the value to which the modifier “about” or “approximately” refers is itself also specifically, and preferably, disclosed.

[0087] Reference throughout this specification to “one embodiment”, “an embodiment,” “an example embodiment,” means that a particular feature, structure or characteristic described in connection with the embodiment is included in at least one embodiment of the present invention. Thus, appearances of the phrases “in one embodiment,” “in an embodiment,” or “an example embodiment” in various places throughout this specification are not necessarily all referring to the same embodiment, but may. Furthermore, the particular features, structures or characteristics may be combined in any suitable manner, as would be apparent to a person skilled in the art from this disclosure, in one or more embodiments. Furthermore, while some embodiments described herein include some but not other features included in other embodiments, combinations of features of different embodiments are meant to be within the scope of the invention. For example, in the appended claims, any of the claimed embodiments can be used in any combination.

[0088] C2c2 is now known as Cas13a. It will be understood that the term “C2c2” herein is used interchangeably with “Cas13a”.

[0089] All publications, published patent documents, and patent applications cited herein are hereby incorporated by reference to the same extent as though each individual publication, published patent document, or patent application was specifically and individually indicated as being incorporated by reference.

[0090] Various embodiments are described hereinafter. It should be noted that the specific embodiments are not intended as an exhaustive description or as a limitation to the broader aspects discussed herein. One aspect described in conjunction with a particular embodiment is not necessarily limited to that embodiment and can be practiced with any other embodiment(s).

[0091] Various embodiments are described hereinafter. It should be noted that the specific embodiments are not intended as an exhaustive description or as a limitation to the broader aspects discussed herein. One aspect described in conjunction with a particular embodiment is not necessarily limited to that embodiment and can be practiced with any other embodiment(s).

### Overview

[0092] The embodiments disclosed herein provide systems, constructs, and methods for targeted base editing. In general the systems disclosed herein comprise a targeting component and a base editing component. The targeting component functions to specifically target the base editing component to a target nucleotide sequence in which one or more nucleotides are to be edited. The base editing component may then catalyze a chemical reaction to convert a first nucleotide in the target sequence to a second nucleotide. For example, the base editor may catalyze conversion of an adenine such that it is read as guanine, or vice versa, or conversion of cytidine to a uracil, or vice versa. In certain example embodiments, the base editor may be derived by starting with a known base editor, such as adenine deaminase or cytodine deaminase, and using methods such as directed evolution to derive new functionalities. Directed evolution techniques are known in the art and may include those described in WO 2015/184016 “High-Throughput Assembly of Genetic Permuatations.”

[0093] In one aspect the present invention provides methods for targeted deamination of cytosine in a target RNA. According to the methods of the invention, the cytidine deaminase (CD) protein is recruited specifically to the relevant Cytosine in the target RNA by a CRISPR-Cas complex which can specifically bind to a target sequence. In order to achieve this, the cytidine deaminase protein can either be covalently linked to the CRISPR-Cas enzyme or be provided as a separate protein, but adapted so as to ensure recruitment thereof to the CRISPR-Cas complex.

[0094] In particular embodiments, of the methods of the present invention, recruitment of the cytidine deaminase to the target RNA is ensured by fusing the cytidine deaminase or catalytic domain thereof to the CRISPR-Cas protein, which is a Cas13 protein. Methods of generating a fusion protein from two separate proteins are known in the art and typically involve the use of spacers or linkers. The Cas13 protein can be fused to the cytidine deaminase protein or catalytic domain thereof on either the N- or C-terminal end thereof. In particular embodiments, the CRISPR-Cas protein is a Cas protein and is linked to the N-terminus of the deaminase protein or its catalytic domain.

[0095] The term “linker” as used in reference to a fusion protein refers to a molecule which joins the proteins to form a fusion protein. Generally, such molecules have no specific biological activity other than to join or to preserve some minimum distance or other spatial relationship between the proteins. However, in certain embodiments, the linker may be selected to influence some property of the linker and/or the fusion protein such as the folding, net charge, or hydrophobicity of the linker.

[0096] Suitable linkers for use in the methods of the present invention are well known to those of skill in the art and include, but are not limited to, straight or branched-chain carbon linkers, heterocyclic carbon linkers, or peptide linkers. However, as used herein the linker may also be a covalent bond (carbon-carbon bond or carbon-heteroatom bond). In particular embodiments, the linker is used to separate the CRISPR-Cas protein and the cytidine deaminase by a distance sufficient to ensure that each protein retains its required functional property. Preferred peptide linker sequences adopt a flexible extended conformation and do not exhibit a propensity for developing an ordered secondary structure. In certain embodiments, the linker can be a chemical moiety which can be monomeric, dimeric, multimeric or polymeric. Preferably, the linker comprises amino acids. Typical amino acids in flexible linkers include Gly, Asn and Ser. Accordingly, in particular embodiments, the linker comprises a combination of one or more of Gly, Asn and Ser amino acids. Other near neutral amino acids, such as Thr and Ala, also may be used in the linker sequence. Exemplary linkers are disclosed in Maratea et al. (1985), Gene 40: 39-46; Murphy et al. (1986) Proc. Nat'l. Acad. Sci. USA 83: 8258-62; U.S. Pat. Nos. 4,935,233; and 4,751,180. For example, GlySer linkers GGS, GGGS or GSG can be used. GGS, GSG, GGGS or GGGGS linkers can be used in repeats of 3 (such as (GGS)₃ (SEQ ID No. 37), (GGGGS)3) (SEQ ID No. 1) or 5, 6, 7, 9 or even 12 (SEQ ID Nos. 3, 4, 5, 7 or 38) or more, to provide suitable lengths. In particular embodiments, linkers such as (GGGGS)₃) (SEQ ID No. 1) are preferably used herein. (GGGGS)₆ (GGGGS)₉ or (GGGGS)₁₂) (SEQ ID Nos. 4, 7 or 38) may preferably be used as alternatives. Other preferred alternatives are (GGGGS)₁, (GGGGS)₂, (GGGGS)₄, (GGGGS)₅, (GGGGS)₇, (GGGGS)₈, (GGGGS)₁₀, or (GGGGS)₁₁ (SEQ ID Nos. 39, 40, 2, 3, 5, 6, 8 or 9). In yet a further embodiment, LEPGEKPYKCPECGKSFSQSGALTRHQRTHTR (SEQ ID NO:11) is used as a linker. In yet an additional embodiment, the linker is XTEN linker (SEQ ID No. 66). In particular embodiments, the CRISPR-cas protein is a Cas13 protein and is linked to the deaminase protein or its catalytic domain by means of an LEPGEKPYKCPECGKSFSQSGALTRHQRTHTR (SEQ ID NO:11) linker. In further particular embodiments, the Cas13 protein is linked C-terminally to the N-terminus of a deaminase protein or its catalytic domain by means of an LEPGEKPYKCPECGKSFSQSGALTRHQRTHTR (SEQ ID NO:11) linker. In addition, N- and C-terminal NLSs can also function as linker (e.g., PKKKRKVEASSPKKRKVEAS (SEQ ID NO:1)).

[0097] In particular embodiments of the methods of the present invention, the cytidine deaminase protein or catalytic domain thereof is delivered to the cell or expressed within the cell as a separate protein, but is modified so as to be able to link to either the Cas13 protein or the guide molecule. In particular embodiments, this is ensured by the use of orthogonal RNA-binding protein or adaptor protein/aptamer combinations that exist within the diversity of bacteriophage coat proteins. Examples of such coat proteins include but are not limited to: MS2, Qβ, F2, GA, fr, JP501, M12, R17, BZ13, JP34, JP500, KU1, M11, MX1, TW18, VK, SP, FI, ID2, NL95, TW19, AP205, ϕCb5, ϕCb8r, ϕ12r, ϕCb23r, 7s and PRR1. Aptamers can be naturally occurring or synthetic oligonucleotides that have been engineered through repeated rounds of in vitro selection or SELEX (systematic evolution of ligands by exponential enrichment) to bind to a specific target.

[0098] In particular embodiments of the methods and systems of the present invention, the guide molecule is provided with one or more distinct RNA loop(s) or distinct sequence(s) that can recruit an adaptor protein. A guide molecule may be extended, without colliding with the Cas13 protein by the insertion of distinct RNA loop(s) or distinct sequence(s) that may recruit adaptor proteins that can bind to the distinct RNA loop(s) or distinct sequence(s). Examples of modified guides and their use in recruiting effector domains to the CRISPR-Cas complex are provided in Konermann (Nature 2015, 517(7536): 583-588). In particular embodiments, the aptamer is a minimal hairpin aptamer which selectively binds dimerized MS2 bacteriophage coat proteins in mammalian cells and is introduced into the guide molecule, such as in the stemloop and/or in a tetraloop. In these embodiments, the cytidine deaminase protein is fused to MS2. The cytidine deaminase protein is then co-delivered together with the CRISPR-Cas protein and corresponding guide RNA.

[0099] The term “CD-functionalized CRISPR system” as used here refers to a nucleic acid targeting and editing system comprising (a) a CRISPR-Cas protein, more particularly a Cas13 protein which is catalytically inactive or a nickase; (b) a guide molecule which comprises a guide sequence; and (c) a cytidine deaminase protein or catalytic domain thereof; wherein the cytidine deaminase protein or catalytic domain thereof is covalently or non-covalently linked to the CRISPR-Cas protein or the guide molecule or is adapted to link thereto after delivery; wherein said guide molecule forms a complex with said catalytically inactive Cas13 and directs said complex to bind said target RNA, wherein said guide sequence is capable of hybridizing with a target sequence within said target RNA to form an RNA duplex; wherein: (A) said Cytosine is outside said target sequence that forms said RNA duplex, wherein said cytidine deaminase protein or catalytic domain thereof deaminates said Cytosine outside said RNA duplex, or (B) said Cytosine is within said target sequence that forms said RNA duplex, wherein said guide sequence comprises a non-pairing Adenine or Uracil at a position corresponding to said Cytosine resulting in a C-A or C-U mismatch in said RNA duplex, and wherein the cytidine deaminase protein or catalytic domain thereof deaminates the Cytosine in the RNA duplex opposite to the non-pairing Adenine or Uracil. In particular embodiments, the guide sequence further comprises at least one additional mismatch or non-pairing nucleotide with the target sequence, adjacent to said non-pairing Adenine or Uracil. This results in a region of single strand RNA at the location of the Cytosine of interest in the target strand, allowing the cytidine deaminase to act specifically thereon. In some embodiments, the guide sequence of the guide molecule comprises at least one further mismatch or non-pairing nucleotide with the target sequence, adjacent to said non-pairing Adenine or Uracil. In some embodiments, the guide sequence comprises a stretch of three to five consecutive mismatches with the target sequence. In some embodiments the guide sequence comprises less than 8 consecutive mismatches with the target sequence. In some embodiments, the guide sequence comprises one or more mismatches 3′ and one or more mismatches 5′ of the non-pairing Adenine or Uracil. In particular embodiments, the guide sequence comprises one, two three or four mismatches with the target sequence on each side of the non-pairing Adenine of Uracil. Details on the aspect of the guide of the CD-functionalized CRISPR-Cas system are provided herein below.

[0100] In some embodiments, the components (a), (b) and (c) are delivered to the cell as a ribonucleoprotein complex. The ribonucleoprotein complex can be delivered via one or more lipid nanoparticles.

[0101] In some embodiments, the components (a), (b) and (c) are delivered to the cell as one or more RNA molecules, such as one or more guide RNAs and one or more mRNA molecules encoding the CRISPR-Cas protein, the cytidine deaminase protein, and optionally the adaptor protein. The RNA molecules can be delivered via one or more lipid nanoparticles.

[0102] In some embodiments, the components (a), (b) and (c) are delivered to the cell as one or more DNA molecules. In some embodiments, the one or more DNA molecules are comprised within one or more vectors such as viral vectors (e.g., AAV). In some embodiments, the one or more DNA molecules comprise one or more regulatory elements operably configured to express the CRISPR-Cas protein, the guide molecule, and the cytidine deaminase protein or catalytic domain thereof, optionally wherein the one or more regulatory elements comprise inducible promoters. For application in eukaryotic cells, the Cas13 protein and/or the cytidine deaminase can be NES-tagged.

[0103] In some embodiments, the CRISPR-Cas protein is a catalytically inactive Cas13. In some embodiments, the catalytically inactive Cas13 comprises a mutation in the HEPN domain. In some embodiments, the catalytically inactive Cas13 has at least part of the HEPN domain removed. Details on the aspect of the CRISPR-Cas protein in the CD-functionalized CRISPR-Cas system are provided herein elsewhere.

[0104] In some embodiments of the guide molecule is capable of hybridizing with a target sequence comprising the C to be deaminated within the target RNA to form a RNA duplex which comprises a non-pairing A or U opposite to said C, optionally within a stretch of up to 5, 6, 7 or 8 mismatching nucleotides. Upon RNA duplex formation, the guide molecule forms a complex with the Cas13 protein and directs the complex to bind the target RNA, allowing the targeted C to be deaminased by the CD. Details on the aspect of the guide of the CD-functionalized CRISPR-Cas system are provided herein below.

[0105] In some embodiments, a Cas13 guide RNA having a canonical length (e.g., about 15-30 nt) is used to form a RNA duplex with the target RNA. In some embodiments, a Cas13 guide molecule longer than the canonical length (e.g., >30 nt) is used to form a RNA duplex with the target RNA including outside of the Cas13-guide RNA-target RNA complex.

[0106] In at least a first design, the CD-functionalized CRISPR system comprises (a) a cytidine deaminase fused or linked to a CRISPR-Cas protein, wherein the CRISPR-Cas protein is catalytically inactive Cas13, and (b) a guide molecule comprising a guide sequence, optionally designed to either (A) be upstream or downstream of the Cytosine of interest or (B) introduce a C-A/U mismatch in a RNA duplex formed between the guide sequence and the target sequence. In some embodiments, the CRISPR-Cas protein and/or the cytidine deaminase are NES-tagged, on either the N- or C-terminus or both.

[0107] In at least a second design, the CD-functionalized CRISPR system comprises (a) a CRISPR-Cas protein that is catalytically inactive Cas13, (b) a guide molecule comprising a guide sequence, optionally designed to either (A) be upstream or downstream of the Cytosine of interest or (B) introduce a C-A/U mismatch in a RNA duplex formed between the guide sequence and the target sequence, and an aptamer sequence (e.g., MS2 RNA motif or PP7 RNA motif) capable of binding to an adaptor protein (e.g., MS2 coating protein or PP7 coat protein), and (c) a cytidine deaminase fused or linked to an adaptor protein, wherein the binding of the aptamer and the adaptor protein recruits the cytidine deaminase to the RNA duplex formed between the guide sequence and the target sequence for targeted deamination, either at a C outside the target sequence or at the C of the optional C-A/U mismatch. In some embodiments, the adaptor protein and/or the cytidine deaminase are NES-tagged, on either the N- or C-terminus or both. The CRISPR-Cas protein can also be NES-tagged.

[0108] The use of different aptamers and corresponding adaptor proteins also allows orthogonal gene editing to be implemented. In one example in which cytidine deaminase are used in combination with adenosine deaminase for orthogonal gene editing/deamination, sgRNA targeting different loci are modified with distinct RNA loops in order to recruit MS2-adenosine deaminase and PP7-cytidine deaminase (or PP7-adenosine deaminase and MS2-cytidine deaminase), respectively, resulting in orthogonal deamination of A or C at the target RNA, respectively. PP7 is the RNA-binding coat protein of the bacteriophage Pseudomonas. Like MS2, it binds a specific RNA sequence and secondary structure. The PP7 RNA-recognition motif is distinct from that of MS2. Consequently, PP7 and MS2 can be multiplexed to mediate distinct effects at different RNAs simultaneously. For example, an sgRNA targeting RNA-A can be modified with MS2 loops, recruiting MS2-cytidine deaminase, while another sgRNA targeting RNA-B can be modified with PP7 loops, recruiting PP7-adenosine deaminase. In the same cell, orthogonal, locus-specific modifications are thus realized. This principle can be extended to incorporate other orthogonal RNA-binding proteins.

[0109] In at least a third design, the CD-functionalized CRISPR system comprises (a) a cytidine deaminase inserted into an internal loop or unstructured region of a CRISPR-Cas protein, wherein the CRISPR-Cas protein is catalytically inactive Cas13, and (b) a guide molecule comprising a guide sequence, optionally designed to either (A) be upstream or downstream of the Cytosine of interest or (B) introduce a C-A/U mismatch in a RNA duplex formed between the guide sequence and the target sequence.

[0110] CRISPR-Cas protein split sites that are suitable for inseration of cytidine deaminase can be identified with the help of a crystal structure. One can use the crystal structure of an ortholog if a relatively high degree of homology exists between the ortholog and the intended CRISPR-Cas protein.

[0111] The split position may be located within a region or loop. Preferably, the split position occurs where an interruption of the amino acid sequence does not result in the partial or full destruction of a structural feature (e.g. alpha-helixes or (3-sheets). Unstructured regions (regions that did not show up in the crystal structure because these regions are not structured enough to be “frozen” in a crystal) are often preferred options. The positions within the unstructured regions or outside loops may not need to be exactly the numbers provided above, but may vary by, for example 1, 2, 3, 4, 5, 6, 7, 8, 9, or even 10 amino acids either side of the position given above, depending on the size of the loop, so long as the split position still falls within an unstructured region of outside loop.

[0112] The CD-functionalized CRISPR system described herein can be used to target a specific Cytosine within a RNA sequence for deamination. For example, the guide molecule can form a complex with the CRISPR-Cas protein and directs the complex to bind a target sequence at the target RNA. The guide sequence can be designed to be upstream or downstreat of the Cytosine of interest, allowing the RNA duplex to form upstream or downstream of the Cytosine of interesting, such that the cytidine deaminase can contact and deaminate the C in a region of single strand RNA outside the RNA duplex. Alternatively, the guide sequence can be designed to have a non-pairing A or U with the Cytosine of interest, which in particular embodiments is extended to a stretch of non-pairing nucleotides, such that the RNA duplex formed between the guide sequence and the target sequence comprises a region of single strand RNA, which directs the cytidine deaminase to contact and deaminate the C opposite to the non-pairing A or U, converting it to an Uracil (U). Since Uracil (U) base pairs with A and functions like T in cellular process, the targeted deamination of C described herein are useful for correction of undesirable T(U)-C and A-G mutations, as well as for obtaining desirable G-A and C-T mutations.

[0113] In some embodiments, the CD-functionalized CRISPR system is used for targeted deamination in a RNA molecule in vitro. In some embodiments, the CD-functionalized CRISPR system is used for targeted deamination in a RNA molecule within a cell. The cell can be a eukaryotic cell, such as an animal cell, a mammalian cell, a human, or a plant cell.

[0114] The invention also relates to a method for treating or preventing a disease by the targeted deamination using the CD-functionalized CRISPR system, wherein the deamination of the C restores a healthy genotype at the target RNA, which remedies a disease caused by a T(U)→C or A→G point mutation or a pathogenic SNP.

[0115] The invention also relates to a method for knocking-out or knocking-down an undesirable activity of a gene or regulatory element thereof, wherein the deamination of the Cytosine at the target RNA inactivates a target gene transcript. For example, in one embodiment, the targeted deamination by the CD-functionalized CRISPR system can cause a nonsense mutation resulting in a premature translation stop codon in a target gene transcript (e.g., converting CAA, CGA or CAG to T(U)AA, T(U)GA or T(U)AG, respectively). This may alter the translation of the target gene transcript and can lead to a desirable trait in the edited cell. In another embodiment, the targeted deamination by the CD-functionalized CRISPR system can cause a nonconservative missense mutation resulting in a code for a different amino acid residue in a target gene transcript. This may alter the function of the target gene transcript expressed and can also lead to a desirable trait in the edited cell.

[0116] The invention also relates to a modified cell obtained by the targeted deamination using the CD-functionalized CRISPR system, or progeny thereof, wherein the modified cell comprises an U or T in replace of the C in the target RNA compared to a corresponding cell before the targeted deamination. The modified cell can be a eukaryotic cell, such as an animal cell, a plant cell, a mammalian cell, or a human cell.

[0117] In some embodiments, the modified cell is a therapeutic T cell, such as a T cell sutiable for CAR-T therapies. The modification may result in one or more desirable traits in the therapeutic T cell, including but not limited to, reduced expression of an immune checkpoint receptor (e.g., PDA, CTLA4), reduced expression of HLA proteins (e.g., B2M, HLA-A), and reduced expression of an endogenous TCR.

[0118] In some embodiments, the modified cell is an antibody-producing B cell. The modification may result in one or more desirable traits in the B cell, including but not limited to, enhanced antibody production.

[0119] The invention also relates to a modified non-human animal or a modified plant. The modified non-human animal can be a farm animal. The modified plant can be an agricultural crop.

[0120] The invention further relates to a method for cell therapy, comprising administering to a patient in need thereof the modified cell described herein, wherein the presence of the modified cell remedies a disease in the patient. In one embodiment, the modified cell for cell therapy is a CAR-T cell capable of recognizing and/or attacking a tumor cell. In another embodiment, the modified cell for cell therapy is a stem cell, such as a neural stem cell, a mesenchymal stem cell, a hematopoietic stem cell, or an iPSC cell.

[0121] The invention additionally relates to an engineered, non-naturally occurring system suitable for modifying an Cytosine in a target RNA, comprising: a guide molecule which comprises a guide sequence, or a nucleotide sequence encoding the guide molecule; a CRISPR-Cas protein, or one or more nucleotide sequences encoding the CRISPR-Cas protein; a cytidine deaminase protein or catalytic domain thereof, or one or more nucleotide sequences encoding; wherein the cytidine deaminase protein or catalytic domain thereof is covalently or non-covalently linked to the CRISPR-Cas protein or the guide molecule or is adapted to link thereto after delivery; wherein said guide sequence is capable of hybridizing with a target sequence within said target RNA to form an RNA duplex; wherein: (A) said Cytosine is outside said target sequence that forms said RNA duplex, or (B) said Cytosine is within said target sequence that forms said RNA duplex and wherein said guide sequence comprises a non-pairing Adenine or Uracil at a position corresponding to said Cytosine resulting in a C-A or C-U mismatch in said RNA duplex.

[0122] The invention additionally relates to an engineered, non-naturally occurring vector system suitable for modifying an Cytosine in a target RNA, comprising one or more vectors comprising: a first regulatory element operably linked to one or more nucleotide sequences encoding a guide molecule which comprises a guide sequence; a second regulatory element operably linked to a nucleotide sequence encoding a CRISPR-Cas protein; and optionally a nucleotide sequence encoding a cytidine deaminase protein protein or catalytic domain thereof which is under control of the first or second regulatory element or operably linked to a third regulatory element; wherein, if the nucleotide sequence encoding a cytidine deaminase protein or catalytic domain thereof is operably linked to a third regulatory element, the cytidine deaminase protein or catalytic domain thereof is adapted to link to the guide molecule or the Crispr-Cas protein after expression; wherein components (a), (b) and (c) are located on the same or different vectors of the system.

[0123] The invention additionally relates to in vitro, ex vivo or in vivo host cell or cell line or progeny thereof comprising the engineered, non-naturally occurring system or vector system described herein. The host cell can be a eukaryotic cell, such as an animal cell, a plant cell, a mammalian cell, or a human cell.

### Cytidine Deaminase

[0124] The term “cytidine deaminase” or “cytidine deaminase protein” as used herein refers to a protein, a polypeptide, or one or more functional domain(s) of a protein or a polypeptide that is capable of catalyzing a hydrolytic deamination reaction that converts an cytosine (or an cytosine moiety of a molecule) to an uracil (or a uracil moiety of a molecule), as shown below. In some embodiments, the cytosine-containing molecule is an cytidine (C), and the uracil-containing molecule is an uridine (U). The cytosine-containing molecule can be deoxyribonucleic acid (DNA) or ribonucleic acid (RNA).

[chemical structure]

[0125] According to the present disclosure, cytidine deaminases that can be used in connection with the present disclosure include, but are not limited to, members of the enzyme family known as apolipoprotein B mRNA-editing complex (APOBEC) family deaminase, an activation-induced deaminase (AID), or a cytidine deaminase 1 (CDA1). In particular embodiments, the deaminase in an APOBEC1 deaminase, an APOBEC2 deaminase, an APOBEC3A deaminase, an APOBEC3B deaminase, an APOBEC3C deaminase, and APOBEC3D deaminase, an APOBEC3E deaminase, an APOBEC3F deaminase an APOBEC3G deaminase, an APOBEC3H deaminase, or an APOBEC4 deaminase.

[0126] In the methods and systems of the present invention, the cytidine deaminase is capable of targeting Cytosine in a DNA single strand. In certain example embodiments the cytodine deaminase may edit on a single strand present outside of the binding component e.g. bound Cas13. In other example embodiments, the cytodine deaminasemay edit at a localized bubble, such as a localized bubble formed by a mismatch at the target edit site but the guide sequence. In certain example embodiments the cytodine deaminase may contain mutations that help focus the are of activity such as those disclosed in Kim et al., Nature Biotechnology (2017) 35(4):371-377 (doi:10.1038/nbt.3803.

[0127] In some embodiments, the cytidine deaminase is derived from one or more metazoa species, including but not limited to, mammals, birds, frogs, squids, fish, flies and worms. In some embodiments, the cytidine deaminase is a human, primate, cow, dog rat or mouse cytidine deaminase.

[0128] In some embodiments, the cytidine deaminase is a human APOBEC, including hAPOBEC1 or hAPOBEC3. In some embodiments, the cytidine deaminase is a human AID.

[0129] In some embodiments, the cytidine deaminase protein recognizes and converts one or more target cytosine residue(s) in a single-stranded bubble of a RNA duplex into uracil residues (s). In some embodiments, the cytidine deaminase protein recognizes a binding window on the single-stranded bubble of a RNA duplex. In some embodiments, the binding window contains at least one target cytosine residue(s). In some embodiments, the binding window is in the range of about 3 bp to about 100 bp. In some embodiments, the binding window is in the range of about 5 bp to about 50 bp. In some embodiments, the binding window is in the range of about 10 bp to about 30 bp. In some embodiments, the binding window is about 1 bp, 2 bp, 3 bp, 5 bp, 7 bp, 10 bp, 15 bp, 20 bp, 25 bp, 30 bp, 40 bp, 45 bp, 50 bp, 55 bp, 60 bp, 65 bp, 70 bp, 75 bp, 80 bp, 85 bp, 90 bp, 95 bp, or 100 bp.

[0130] In some embodiments, the cytidine deaminase protein comprises one or more deaminase domains. Not intended to be bound by theory, it is contemplated that the deaminase domain functions to recognize and convert one or more target cytosine (C) residue(s) contained in a single-stranded bubble of a RNA duplex into (an) uracil (U) residue (s). In some embodiments, the deaminase domain comprises an active center. In some embodiments, the active center comprises a zinc ion. In some embodiments, amino acid residues in or near the active center interact with one or more nucleotide(s) 5′ to a target cytosine residue. In some embodiments, amino acid residues in or near the active center interact with one or more nucleotide(s) 3′ to a target cytosine residue.

[0131] In some embodiments, the cytidine deaminase comprises human APOBEC1 full protein (hAPOBEC1) or the deaminase domain thereof (hAPOBEC1-D) or a C-terminally truncated version thereof (hAPOBEC-T). In some embodiments, the cytidine deaminase is an APOBEC family member that is homologous to hAPOBEC1, hAPOBEC-D or hAPOBEC-T. In some embodiments, the cytidine deaminase comprises human AID1 full protein (hAID) or the deaminase domain thereof (hAID-D) or a C-terminally truncated version thereof (hAID-T). In some embodiments, the cytidine deaminase is an AID family member that is homologous to hAID, hAID-D or hAID-T. In some embodiments, the hAID-T is a hAID which is C-terminally truncated by about 20 amino acids.

[0132] In some embodiments, the cytidine deaminase comprises the wild-type amino acid sequence of a cytosine deaminase. In some embodiments, the cytidine deaminase comprises one or more mutations in the cytosine deaminase sequence, such that the editing efficiency, and/or substrate editing preference of the cytosine deaminase is changed according to specific needs.

[0133] Certain mutations of APOBEC1 and APOBEC3 proteins have been described in Kim et al., Nature Biotechnology (2017) 35(4):371-377 (doi:10.1038/nbt.3803); and Harris et al. Mol. Cell (2002) 10:1247-1253, each of which is incorporated herein by reference in its entirety.

[0134] In some embodiments, the cytidine deaminase is an APOBEC1 deaminase comprising one or more mutations at amino acid positions corresponding to W90, R118, H121, H122, R126, or R132 in rat APOBEC1, or an APOBEC3G deaminase comprising one or more mutations at amino acid positions corresponding to W285, R313, D316, D317X, R320, or R326 in human APOBEC3 G.

[0135] In some embodiments, the cytidine deaminase comprises a mutation at tryptophane⁹⁰ of the rat APOBEC1 amino acid sequence, or a corresponding position in a homologous APOBEC protein, such as tryptophane²⁸⁵ of APOBEC3G. In some embodiments, the tryptophane residue at position 90 is replaced by an tyrosine or phenylalanine residue (W90Y or W90F).

[0136] In some embodiments, the cytidine deaminase comprises a mutation at Arginine¹¹⁸ of the rat APOBEC1 amino acid sequence, or a corresponding position in a homologous APOBEC protein. In some embodiments, the arginine residue at position 118 is replaced by an alanine residue (R118A).

[0137] In some embodiments, the cytidine deaminase comprises a mutation at Histidine¹²¹ of the rat APOBEC1 amino acid sequence, or a corresponding position in a homologous APOBEC protein. In some embodiments, the histidine residue at position 121 is replaced by an arginine residue (H121R).

[0138] In some embodiments, the cytidine deaminase comprises a mutation at Histidine¹²² of the rat APOBEC1 amino acid sequence, or a corresponding position in a homologous APOBEC protein. In some embodiments, the histidine residue at position 122 is replaced by an arginine residue (H122R).

[0139] In some embodiments, the cytidine deaminase comprises a mutation at Arginine¹²⁶ of the rat APOBEC1 amino acid sequence, or a corresponding position in a homologous APOBEC protein, such as Arginine³²⁰ of APOBEC3G. In some embodiments, the arginine residue at position 126 is replaced by an alanine residue (R126A) or by a glutamic acid (R126E).

[0140] In some embodiments, the cytidine deaminase comprises a mutation at arginine¹³² of the APOBEC1 amino acid sequence, or a corresponding position in a homologous APOBEC protein. In some embodiments, the arginine residue at position 132 is replaced by a glutamic acid residue (R132E).

[0141] In some embodiments, to narrow the width of the editing window, the cytidine deaminase may comprise one or more of the mutations: W90Y, W90F, R126E and R132E, based on amino acid sequence positions of rat APOBEC1, and mutations in a homologous APOBEC protein corresponding to the above.

[0142] In some embodiments, to reduce editing efficiency, the cytidine deaminase may comprise one or more of the mutations: W90A, R118A, R132E, based on amino acid sequence positions of rat APOBEC1, and mutations in a homologous APOBEC protein corresponding to the above. In particular embodiments, it can be of interest to use a cytidine deaminase enzyme with reduced efficacy to reduce off-target effects.

[0143] In some embodiments, the cytidine deaminase is wild-type rat APOBEC1 (rAPOBEC1, or a catalytic domain thereof. In some embodiments, the cytidine deaminase comprises one or more mutations in the rAPOBEC1 sequence, such that the editing efficiency, and/or substrate editing preference of rAPOBEC1 is changed according to specific needs.

rAPOBEC1:
(SEQ ID NO: 42)
[sequence omitted]

[0144] In some embodiments, the cytidine deaminase is wild-type human APOBEC1 (hAPOBEC1) or a catalytic domain thereof. In some embodiments, the cytidine deaminase comprises one or more mutations in the hAPOBEC1 sequence, such that the editing efficiency, and/or substrate editing preference of hAPOBEC1 is changed according to specific needs.

APOBEC1:
(SEQ ID NO: 43)
MTSEKGPSTGDPTLRRRIEPWEFDVFYDPRELRKEACLLYEIKWGMSRKI
WRSSGKNTTNHVEVNFIKKFTSERDFHPSMSCSITWFLSWSPCWECSQAI
REFLSRHPGVTLVIYVARLFWHMDQQNRQGLRDLVNSGVTIQIMRASEYY
HCWRNFVNYPPGDEAHWPQYPPLWMMLYALELHCIILSLPPCLKISRRWQ
NHLTFFRLHLQNCHYQTIPPHILLATGLIHPSVAWR

[0145] In some embodiments, the cytidine deaminase is wild-type human APOBEC3G (hAPOBEC3G) or a catalytic domain thereof. In some embodiments, the cytidine deaminase comprises one or more mutations in the hAPOBEC3G sequence, such that the editing efficiency, and/or substrate editing preference of hAPOBEC3G is changed according to specific needs.

hAPOBEC3G:
(SEQ ID NO: 44)
MELKYHPEMRFFHWFSKWRKLHRDQEYEVTWYISWSPCTKCTRDMATFLA
EDPKVTLTIFVARLYYFWDPDYQEALRSLCQKRDGPRATMKIMNYDEFQH
CWSKFVYSQRELFEPWNNLPKYYILLHIMLGEILRHSMDPPTFTENENNE
PWVRGRHETYLCYEVERMHNDTWVLLNQRRGELCNQAPHKHGELEGRHAE
LCFLDVIPFWKLDLDQDYRVTCFTSWSPCFScAQEMAKFISKNKHVSLCI
FTARIYDDQGRCQEGLRTLAEAGAKISIMTYSEFKHCWDTFVDHQGCPFQ
PWDGLDEHSQDLSGRLRAILQNQEN

[0146] In some embodiments, the cytidine deaminase is wild-type Petromyzon marinus CDA1 (pmCDA1) or a catalytic domain thereof. In some embodiments, the cytidine deaminase comprises one or more mutations in the pmCDA1 sequence, such that the editing efficiency, and/or substrate editing preference of pmCDA1 is changed according to specific needs.

pmCDA1:
(SEQ ID NO: 45)
MTDAEYVRIHEKLDIYTFKKQFFNNKKSVSHRCYVLFELKRRGERRACFW
GYAVNKPQSGTERGIHAEIFSIRKVEEYLRDNPGQFTINWYSSWSPCADC
AEKILEWYNQELRGNGHTLKIWACKLYYEKNARNQIGLWNLRDNGVGLNV
MVSEHYQCCRKIFIQSSHNQLNENRWLEKTLKRAEKRRSELSIMIQVKIL
HTTKSPAV

[0147] In some embodiments, the cytidine deaminase is wild-type human AID (hAID) or a catalytic domain thereof. In some embodiments, the cytidine deaminase comprises one or more mutations in the pmCDA1 sequence, such that the editing efficiency, and/or substrate editing preference of pmCDA1 is changed according to specific needs.

hAID:
(SEQ ID NO: 46)
MDSLLMNRRKFLYQFKNVRWAKGRRETYLCYVVKRRDSATSFSLDFGYLR
NKNGCHVELLFLRYISDWDLDPGRCYRVTWFTSWSPCYDCARHVADFLRG
NPYLSLRIFTARLYFCEDRKAEPEGLRRLHRAGVQIAIMTFKDYFYCWNT
FVENHERTFKAWEGLHENSVRLSRQLRRILLPLYEVDDLRDAFRTLGLLD

[0148] In some embodiments, the cytidine deaminase is truncated version of hAID (hAID-DC) or a catalytic domain thereof. In some embodiments, the cytidine deaminase comprises one or more mutations in the hAID-DC sequence, such that the editing efficiency, and/or substrate editing preference of hAID-DC is changed according to specific needs.

hAID-DC:
(SEQ ID NO: 47)
MDSLLMNRRKFLYQFKNVRWAKGRRETYLCYVVKRRDSATSFSLDFGYLR
NKNGCHVELLFLRYISDWDLDPGRCYRVTWFTSWSPCYDCARHVADFLRG
NPNLSLRIFTARLYFCEDRKAEPEGLRRLHRAGVQIAIMTFKDYFYCWNT
FVENHERTFKAWEGLHENSVRLSRQLRRILL

[0149] Additional embodiments of the cytidine deaminase are disclosed in WO WO2017/070632, titled “Nucleobase Editor and Uses Thereof,” which is incorporated herein by reference in its entirety.

[0150] In some embodiments, the cytidine deaminase has an efficient deamination window that encloses the nucleotides susceptible to deamination editing. Accordingly, in some embodiments, the “editing window width” refers to the number of nucleotide positions at a given target site for which editing efficiency of the cytidine deaminase exceeds the half-maximal value for that target site. In some embodiments, the cytidine deaminase has an editing window width in the range of about 1 to about 6 nucleotides. In some embodiments, the editing window width of the cytidine deaminase is 1, 2, 3, 4, 5, or 6 nucleotides.

[0151] Not intended to be bound by theory, it is contemplated that in some embodiments, the length of the linker sequence affects the editing window width. In some embodiments, the editing window width increases (e.g., from about 3 to about 6 nucleotides) as the linker length extends (e.g., from about 3 to about 21 amino acids). In a non-limiting example, a 16-residue linker offers an efficient deamination window of about 5 nucleotides. In some embodiments, the length of the guide RNA affects the editing window width. In some embodiments, shortening the guide RNA leads to a narrowed efficient deamination window of the cytidine deaminase.

[0152] In some embodiments, mutations to the cytidine deaminase affect the editing window width. In some embodiments, the cytidine deaminase component of the CD-functionalized CRISPR system comprises one or more mutations that reduce the catalytic efficiency of the cytidine deaminase, such that the deaminase is prevented from deamination of multiple cytidines per DNA binding event. In some embodiments, tryptophan at residue 90 (W90) of APOBEC1 or a corresponding tryptophan residue in a homologous sequence is mutated. In some embodiments, the catalytically inactive Cas13 is fused to or linked to an APOBEC1 mutant that comprises a W90Y or W90F mutation. In some embodiments, tryptophan at residue 285 (W285) of APOBEC3G, or a corresponding tryptophan residue in a homologous sequence is mutated. In some embodiments, the catalytically inactive Cas13 is fused to or linked to an APOBEC3G mutant that comprises a W285Y or W285F mutation.

[0153] In some embodiments, the cytidine deaminase component of CD-functionalized CRISPR system comprises one or more mutations that reduce tolerance for non-optimal presentation of a cytidine to the deaminase active site. In some embodiments, the cytidine deaminase comprises one or more mutations that alter substrate binding activity of the deaminase active site. In some embodiments, the cytidine deaminase comprises one or more mutations that alter the conformation of DNA to be recognized and bound by the deaminase active site. In some embodiments, the cytidine deaminase comprises one or more mutations that alter the substrate accessibility to the deaminase active site. In some embodiments, arginine at residue 126 (R126) of APOBEC1 or a corresponding arginine residue in a homologous sequence is mutated. In some embodiments, the catalytically inactive Cas13 is fused to or linked to an APOBEC1 that comprises a R126A or R126E mutation. In some embodiments, tryptophan at residue 320 (R320) of APOBEC3G, or a corresponding arginine residue in a homologous sequence is mutated. In some embodiments, the catalytically inactive Cas13 is fused to or linked to an APOBEC3G mutant that comprises a R320A or R320E mutation. In some embodiments, arginine at residue 132 (R132) of APOBEC1 or a corresponding arginine residue in a homologous sequence is mutated. In some embodiments, the catalytically inactive Cas13 is fused to or linked to an APOBEC1 mutant that comprises a R132E mutation.

[0154] In some embodiments, the APOBEC1 domain of the CD-functionalized CRISPR system comprises one, two, or three mutations selected from W90Y, W90F, R126A, R126E, and R132E. In some embodiments, the APOBEC1 domain comprises double mutations of W90Y and R126E. In some embodiments, the APOBEC1 domain comprises double mutations of W90Y and R132E. In some embodiments, the APOBEC1 domain comprises double mutations of R126E and R132E. In some embodiments, the APOBEC1 domain comprises three mutations of W90Y, R126E and R132E.

[0155] In some embodiments, one or more mutations in the cytidine deaminase as disclosed herein reduce the editing window width to about 2 nucleotides. In some embodiments, one or more mutations in the cytidine deaminase as disclosed herein reduce the editing window width to about 1 nucleotide. In some embodiments, one or more mutations in the cytidine deaminase as disclosed herein reduce the editing window width while only minimally or modestly affecting the editing efficiency of the enzyme. In some embodiments, one or more mutations in the cytidine deaminase as disclosed herein reduce the editing window width without reducing the editing efficiency of the enzyme. In some embodiments, one or more mutations in the cytidine deaminase as disclosed herein enable discrimination of neighboring cytidine nucleotides, which would be otherwise edited with similar efficiency by the cytidine deaminase.

[0156] In some embodiments, the cytidine deaminase protein further comprises or is connected to one or more double-stranded RNA (dsRNA) binding motifs (dsRBMs) or domains (dsRBDs) for recognizing and binding to double-stranded nucleic acid substrates. In some embodiments, the interaction between the cytidine deaminase and the substrate is mediated by one or more additional protein factor(s), including a CRISPR/CAS protein factor. In some embodiments, the interaction between the cytidine deaminase and the substrate is further mediated by one or more nucleic acid component(s), including a guide RNA.

[0157] According to the present invention, the substrate of the cytidine deaminase is an DNA single strand bubble of a RNA duplex comprising a Cytosine of interest, made accessible to the cytidine deaminase upon binding of the guide molecule to its DNA target which then forms the CRISPR-Cas complex with the CRISPR-Cas enzyme, whereby the cytosine deaminase is fused to or is capable of binding to one or more components of the CRISPR-Cas complex, i.e. the CRISPR-Cas enzyme and/or the guide molecule. The particular features of the guide molecule and CRISPR-Cas enzyme are detailed below.

### Targeting Domain

[0158] The methods, tools, and compositions of the invention comprise or make use of a targeting component which can be referred to as a targeting domain. The targeting domain is preferably a RNA targeting domain, more particularly an oligonucleotide targeting domain, or a variant or fragment thereof which retains RNA binding activity. The oligonucleotide targeting domain may bind a sequence, motif, or structural feature of the RNA of interest at or adjacent to the target locus. A structural feature may include hairpins, tetraloops, or other secondary structural features of a nucleic acid. As used herein “adjacent” means within a distance and/or orientation of the target locus in which the adenosine deaminase can complete its base editing function. In certain example embodiments, the oligonucleotide binding protein may be a RNA-binding protein or functional domain thereof.

[0159] In particular embodiments, the targeting domain further comprises a guide RNA (as will be detailed below). The nucleic acid binding protein can be an (endo)nuclease or any other (oligo)nucleotide binding protein. In particular embodiments, the nucleotide binding protein is modified to inactivate any other function not required for said RNA binding. In particular embodiments, where the nucleotide binding protein is an (endo)nuclease, preferably the (endo)nuclease has altered or modified activity (i.e. a modified nuclease, as described herein elsewhere) compared to the wildtype RNA binding protein. In certain embodiments, said nuclease is a targeted or site-specific or homing nuclease or a variant thereof having altered or modified activity. In certain embodiments, said (oligo)nucleotide binding protein is the (oligo)nucleotide binding domain of said (oligo)nucleotide binding protein and does not comprise one or more domains of said protein not required for RNA binding (more particular does not comprise one or more other functional domains).

### RNA-Binding Proteins

[0160] In certain example embodiments, the oligonucleotide binding domain may comprise or consist of a RNA-binding protein, or functional domain thereof, that comprises a RNA recognition motif. Example RNA-binding proteins comprising a RNA recognition motif include, but are not limited to,

A2BP1; ACF; BOLL; BRUNOL4; BRUNOL5; BRUNOL6; CCBL2; CGI96; CIRBP; CNOT4; CPEB2; CPEB3; CPEB4; CPSF7; CSTF2; CSTF2T; CUGBP1; CUGBP2; D10S102; DAZ1; DA Z2; DAZ3; DAZ4; DAZAP1; DAZL; DNAJC17; DND1; EIF3S4; EIF3S9; EIF4B; EIF4H; ELA VL1; ELAVL2; ELAVL3; ELAVL4; ENOX1; ENOX2; EWSR1; FUS; FUSIP1; G3BP; G3BP1; G3BP2; GRSF 1; HNRNPL; HNRPA0; HNRPA1; HNRPA2B 1; HNRPA3; HNRPAB; HNRPC; HNRPCL1; HNRPD; HNRPDL; HNRPF; HNRPH1; HNRPH2; HNRPH3; HNRPL; HNRPLL; HNRPM; HNRPR; HRNBP1; HSU53209; HTATSF1; IGF2BP1; IGF2BP2; IGF2BP3; LARP7; MKI67IP; MSI1; MSI2; MSSP2; MTHFSD; MYEF2; NCBP2; NCL; NOL8; NONO; P14; PAB PC1; PABPC1L; PABPC3; PABPC4; PABPC5; PABPN1; POLDIP3; PPARGC1; PPARGC1A; PPARGC1B; PPIE; PPIL4; PPRC1; PSPC1; PTBP1; PTBP2; PUF60; RALY; RALYL; RAVER 1; RAVER2; RBM10; RBM11; RBM12; RBM12B; RBM14; RBM15; RBM15B; RBM16; RB M17; RBM18; RBM19; RBM22; RBM23; RBM24; RBM25; RBM26; RBM27; RBM28; RBM3; RBM32B; RBM33; RBM34; RBM35A; RBM35B; RBM38; RBM39; RBM4; RBM41; RBM4 2; RBM44; RBM45; RBM46; RBM47; RBM4B; RBM5; RBM7; RBM8A; RBM9; RBMS1; RB MS2; RBMS3; RBMX; RBMX2; RBMXL2; RBMY1A1; RBMY1B; RBMY1E; RBMY1F; RB MY2FP; RBPMS; RBPMS2; RDBP; RNPC3; RNPC4; RNPS1; ROD1; SAFB; SAFB2; SART3; SETD1A; SF3B14; SF3B4; SFPQ; SFRS1; SFRS10; SFRS11; SFRS12; SFRS15; SFRS2; SFR S2B; SFRS3; SFRS4; SFRS5; SFRS6; SFRS7; SFRS9; SLIRP; SLTM; SNRP70; SNRPA; SNR PB2; SPEN; SR140; SRRP35; SSB; SYNCRIP; TAF15; TARDBP; THOC4; TIA1; TIAL1; TN RC4; TNRC6C; TRA2A; TRSPAP1; TUT1; U1SNRNPBP; U2AF 1; U2AF2; UHMK1; ZCRB1; ZNF638; ZRSR1; and ZRSR2.

[0161] In certain example embodiments, the RNA-binding protein or function domain thereof may comprise a K homology domain. Example RNA-binding proteins comprising a K homology domain include, but are not limited to, AKAP1; ANKHD1; ANKRD17; ASCC1; BICC1; DDX43; DDX53; DPPA5; FMR1; FUBP1; F UBP3; FXR1; FXR2; GLD1; HDLBP; HNRPK; IGF2BP1; IGF2BP2; IGF2BP3; KHDRBS1; K HDRBS2; KHDRBS3; KHSRP; KRR1; MEX3A; MEX3B; MEX3C; MEX3D; NOVA1; NOVA 2; PCBP1; PCBP2; PCBP3; PCBP4; PN01; PNPT1; QKI; SF1; and TDRKH

[0162] In certain example embodiments, the RNA-binding protein comprises a zinc finger motif. RNA-binding proteins or functional domains thereof may comprise a Cys2-His2, Gag-knuckle, Treble-clet, Zinc ribbon, Zn2/Cys6 class motif.

In certain example embodiments, the RNA-binding protein may comprise a Pumilio homology domain.

### CRISPR-Cas Protein and Guide

[0163] In the methods and systems of the present invention use is made of a CRISPR-Cas protein and corresponding guide molecule. In certain embodiments, said CRISPR-Cas protein Cas13a/C2c2, Cas13b, or Cas13c. The CRISPR-Cas system does not require the generation of customized proteins to target specific sequences but rather a single Cas protein can be programmed by guide molecule to recognize a specific nucleic acid target, in other words the Cas enzyme protein can be recruited to a specific nucleic acid target RNA using said guide molecule.

[0164] Guide Molecule

[0165] The guide molecule or guide RNA of a Class 2 type V CRISPR-Cas protein comprises a tracr-mate sequence (encompassing a “direct repeat” in the context of an endogenous CRISPR system) and a guide sequence (also referred to as a “spacer” in the context of an endogenous CRISPR system). Indeed, in contrast to the type II CRISPR-Cas proteins, the Cas13 protein does not rely on the presence of a tracr sequence. In some embodiments, the CRISPR-Cas system or complex as described herein does not comprise and/or does not rely on the presence of a tracr sequence (e.g. if the Cas protein is Cas13). In certain embodiments, the guide molecule may comprise, consist essentially of, or consist of a direct repeat sequence fused or linked to a guide sequence or spacer sequence.

[0166] In general, a CRISPR system is characterized by elements that promote the formation of a CRISPR complex at the site of a target sequence. In the context of formation of a CRISPR complex, “target sequence” refers to a sequence to which a guide sequence is designed to have complementarity, where hybridization between a target RNA sequence and a guide sequence promotes the formation of a CRISPR complex.

[0167] The terms “guide molecule” and “guide RNA” are used interchangeably herein to refer to RNA-based molecules that are capable of forming a complex with a CRISPR-Cas protein and comprises a guide sequence having sufficient complementarity with a target nucleic acid sequence to hybridize with the target nucleic acid sequence and direct sequence-specific binding of the complex to the target nucleic acid sequence. The guide molecule or guide RNA specifically encompasses RNA-based molecules having one or more chemically modifications (e.g., by chemical linking two ribonucleotides or by replacement of one or more ribonucleotides with one or more deoxyribonucleotides), as described herein.

[0168] In some embodiments, the C-U/A mismatch corresponding to the target site of interest is located close to the center of the target sequence and thus the center of the guide sequence, thereby restricting the cytidine deaminase to a narrow editing window (e.g., about 4 bp wide). In some embodiments, the target sequence may comprise more than one target cytosine to be deaminated. In further embodiments the target sequence may further comprise one or more cytosines to be deaminated 3′ to the target cytosine site. In these embodiments, further C-U/A mismatches can be provided in the guide sequence. Depending on their location within the target sequence, these may be located within the same or a separate stretch of mismatching or non-pairing nucleotides in the guide sequence. In some embodiments, to avoid off-target editing, the target sequence does not have further mismatched cytosines within the target sequence.

[0169] In some embodiments, a Cas13 guide sequence having a canonical length (e.g., about 15-30 nt) is used to hybridize with the target RNA. In some embodiments, a Cas13 guide molecule longer than the canonical length (e.g., >30 nt) is used to hybridize with the target RNA, such that a region of the guide sequence hybridizes with a region of the RNA strand outside of the Cas13-guide RNA-target RNA complex. This can be of interest where deamination of more than one cytosine within a given stretch of nucleotides is of interest. In alternative embodiments, it is of interest to maintain the limitation of the canonical guide sequence length. In some embodiments, the guide sequence is designed to introduce a C-U/A mismatch outside of the canonical length of Cas13 guide, distant from the PAM sequence, which may decrease steric hindrance by Cas13 and increase the frequency of contact between the cytidine deaminase and the C-U/A mismatch.

[0170] As used herein, the term “crRNA” or “guide RNA” or “single guide RNA” or “sgRNA” or “one or more nucleic acid components” of a Type V or Type VI CRISPR-Cas locus effector protein comprises any polynucleotide sequence having sufficient complementarity with a target nucleic acid sequence to hybridize with the target nucleic acid sequence and direct sequence-specific binding of a nucleic acid-targeting complex to the target nucleic acid sequence. In some embodiments, the degree of complementarity, when optimally aligned using a suitable alignment algorithm, is about or more than about 50%, 60%, 75%, 80%, 85%, 90%, 95%, 97.5%, 99%, or more. Optimal alignment may be determined with the use of any suitable algorithm for aligning sequences, non-limiting example of which include the Smith-Waterman algorithm, the Needleman-Wunsch algorithm, algorithms based on the Burrows-Wheeler Transform (e.g., the Burrows Wheeler Aligner), ClustalW, Clustal X, BLAT, Novoalign (Novocraft Technologies; available at www.novocraft.com), ELAND (Illumina, San Diego, Calif.), SOAP (available at soap.genomics.org.cn), and Maq (available at maq.sourceforge.net). The ability of a guide sequence (within a nucleic acid-targeting guide RNA) to direct sequence-specific binding of a nucleic acid-targeting complex to a target nucleic acid sequence may be assessed by any suitable assay. For example, the components of a nucleic acid-targeting CRISPR system sufficient to form a nucleic acid-targeting complex, including the guide sequence to be tested, may be provided to a host cell having the corresponding target nucleic acid sequence, such as by transfection with vectors encoding the components of the nucleic acid-targeting complex, followed by an assessment of preferential targeting (e.g., cleavage) within the target nucleic acid sequence, such as by Surveyor assay as described herein. Similarly, cleavage of a target nucleic acid sequence may be evaluated in a test tube by providing the target nucleic acid sequence, components of a nucleic acid-targeting complex, including the guide sequence to be tested and a control guide sequence different from the test guide sequence, and comparing binding or rate of cleavage at the target sequence between the test and control guide sequence reactions. Other assays are possible, and will occur to those skilled in the art. A guide sequence, and hence a nucleic acid-targeting guide may be selected to target any target nucleic acid sequence. The target sequence may be DNA. The target sequence may be any RNA sequence. In some embodiments, the target sequence may be a sequence within a RNA molecule selected from the group consisting of messenger RNA (mRNA), pre-mRNA, ribosomal RNA (rRNA), transfer RNA (tRNA), micro-RNA (miRNA), small interfering RNA (siRNA), small nuclear RNA (snRNA), small nucleolar RNA (snoRNA), double stranded RNA (dsRNA), non-coding RNA (ncRNA), long non-coding RNA (lncRNA), and small cytoplasmatic RNA (scRNA). In some preferred embodiments, the target sequence may be a sequence within a RNA molecule selected from the group consisting of mRNA, pre-mRNA, and rRNA. In some preferred embodiments, the target sequence may be a sequence within a RNA molecule selected from the group consisting of ncRNA, and lncRNA. In some more preferred embodiments, the target sequence may be a sequence within an mRNA molecule or a pre-mRNA molecule.

[0171] In some embodiments, the guide molecule comprises a guide sequence that is designed to have at least one mismatch with the target sequence, such that an RNA duplex formed between the guide sequence and the target sequence comprises a non-pairing C in the guide sequence opposite to the target A for deamination on the target sequence. In some embodiments, aside from this A-C mismatch, the degree of complementarity, when optimally aligned using a suitable alignment algorithm, is about or more than about 50%, 60%, 75%, 80%, 85%, 90%, 95%, 97.5%, 99%, or more.

[0172] As used herein, the term “crRNA” or “guide RNA” or “single guide RNA” or “sgRNA” or “one or more nucleic acid components” of a Type V or Type VI CRISPR-Cas locus effector protein comprises any polynucleotide sequence having sufficient complementarity with a target nucleic acid sequence to hybridize with the target nucleic acid sequence and direct sequence-specific binding of a nucleic acid-targeting complex to the target nucleic acid sequence. In some embodiments, the degree of complementarity, when optimally aligned using a suitable alignment algorithm, is about or more than about 50%, 60%, 75%, 80%, 85%, 90%, 95%, 97.5%, 99%, or more. Optimal alignment may be determined with the use of any suitable algorithm for aligning sequences, non-limiting example of which include the Smith-Waterman algorithm, the Needleman-Wunsch algorithm, algorithms based on the Burrows-Wheeler Transform (e.g., the Burrows Wheeler Aligner), ClustalW, Clustal X, BLAT, Novoalign (Novocraft Technologies; available at www.novocraft.com), ELAND (Illumina, San Diego, Calif.), SOAP (available at soap.genomics.org.cn), and Maq (available at maq.sourceforge.net). The ability of a guide sequence (within a nucleic acid-targeting guide RNA) to direct sequence-specific binding of a nucleic acid-targeting complex to a target nucleic acid sequence may be assessed by any suitable assay. For example, the components of a nucleic acid-targeting CRISPR system sufficient to form a nucleic acid-targeting complex, including the guide sequence to be tested, may be provided to a host cell having the corresponding target nucleic acid sequence, such as by transfection with vectors encoding the components of the nucleic acid-targeting complex, followed by an assessment of preferential targeting (e.g., cleavage) within the target nucleic acid sequence, such as by Surveyor assay as described herein. Similarly, cleavage of a target nucleic acid sequence may be evaluated in a test tube by providing the target nucleic acid sequence, components of a nucleic acid-targeting complex, including the guide sequence to be tested and a control guide sequence different from the test guide sequence, and comparing binding or rate of cleavage at the target sequence between the test and control guide sequence reactions. Other assays are possible, and will occur to those skilled in the art. A guide sequence, and hence a nucleic acid-targeting guide may be selected to target any target nucleic acid sequence. The target sequence may be DNA. The target sequence may be any RNA sequence. In some embodiments, the target sequence may be a sequence within a RNA molecule selected from the group consisting of messenger RNA (mRNA), pre-mRNA, ribosomal RNA (rRNA), transfer RNA (tRNA), micro-RNA (miRNA), small interfering RNA (siRNA), small nuclear RNA (snRNA), small nucleolar RNA (snoRNA), double stranded RNA (dsRNA), non-coding RNA (ncRNA), long non-coding RNA (lncRNA), and small cytoplasmatic RNA (scRNA). In some preferred embodiments, the target sequence may be a sequence within a RNA molecule selected from the group consisting of mRNA, pre-mRNA, and rRNA. In some preferred embodiments, the target sequence may be a sequence within a RNA molecule selected from the group consisting of ncRNA, and lncRNA. In some more preferred embodiments, the target sequence may be a sequence within an mRNA molecule or a pre-mRNA molecule.

[0173] In some embodiments, a nucleic acid-targeting guide is selected to reduce the degree secondary structure within the nucleic acid-targeting guide. In some embodiments, about or less than about 75%, 50%, 40%, 30%, 25%, 20%, 15%, 10%, 5%, 1%, or fewer of the nucleotides of the nucleic acid-targeting guide participate in self-complementary base pairing when optimally folded. Optimal folding may be determined by any suitable polynucleotide folding algorithm. Some programs are based on calculating the minimal Gibbs free energy. An example of one such algorithm is mFold, as described by Zuker and Stiegler (Nucleic Acids Res. 9 (1981), 133-148). Another example folding algorithm is the online webserver RNAfold, developed at Institute for Theoretical Chemistry at the University of Vienna, using the centroid structure prediction algorithm (see e.g., A. R. Gruber et al., 2008, Cell 106(1): 23-24; and PA Carr and GM Church, 2009, Nature Biotechnology 27(12): 1151-62).

[0174] In certain embodiments, a guide RNA or crRNA may comprise, consist essentially of, or consist of a direct repeat (DR) sequence and a guide sequence or spacer sequence. In certain embodiments, the guide RNA or crRNA may comprise, consist essentially of, or consist of a direct repeat sequence fused or linked to a guide sequence or spacer sequence. In certain embodiments, the direct repeat sequence may be located upstream (i.e., 5′) from the guide sequence or spacer sequence. In other embodiments, the direct repeat sequence may be located downstream (i.e., 3′) from the guide sequence or spacer sequence.

[0175] In certain embodiments, the crRNA comprises a stem loop, preferably a single stem loop. In certain embodiments, the direct repeat sequence forms a stem loop, preferably a single stem loop.

[0176] In certain embodiments, the spacer length of the guide RNA is from 15 to 35 nt. In certain embodiments, the spacer length of the guide RNA is at least 15 nucleotides. In certain embodiments, the spacer length is from 15 to 17 nt, e.g., 15, 16, or 17 nt, from 17 to 20 nt, e.g., 17, 18, 19, or 20 nt, from 20 to 24 nt, e.g., 20, 21, 22, 23, or 24 nt, from 23 to 25 nt, e.g., 23, 24, or 25 nt, from 24 to 27 nt, e.g., 24, 25, 26, or 27 nt, from 27-30 nt, e.g., 27, 28, 29, or 30 nt, from 30-35 nt, e.g., 30, 31, 32, 33, 34, or 35 nt, or 35 nt or longer.

[0177] The “tracrRNA” sequence or analogous terms includes any polynucleotide sequence that has sufficient complementarity with a crRNA sequence to hybridize. In some embodiments, the degree of complementarity between the tracrRNA sequence and crRNA sequence along the length of the shorter of the two when optimally aligned is about or more than about 25%, 30%, 40%, 50%, 60%, 70%, 80%, 90%, 95%, 97.5%, 99%, or higher. In some embodiments, the tracr sequence is about or more than about 5, 6, 7, 8, 9, 10, 11, 12, 13, 14, 15, 16, 17, 18, 19, 20, 25, 30, 40, 50, or more nucleotides in length. In some embodiments, the tracr sequence and crRNA sequence are contained within a single transcript, such that hybridization between the two produces a transcript having a secondary structure, such as a hairpin. In an embodiment of the invention, the transcript or transcribed polynucleotide sequence has at least two or more hairpins. In preferred embodiments, the transcript has two, three, four or five hairpins. In a further embodiment of the invention, the transcript has at most five hairpins. In a hairpin structure the portion of the sequence 5′ of the final “N” and upstream of the loop corresponds to the tracr mate sequence, and the portion of the sequence 3′ of the loop corresponds to the tracr sequence.

[0178] In general, degree of complementarity is with reference to the optimal alignment of the sca sequence and tracr sequence, along the length of the shorter of the two sequences. Optimal alignment may be determined by any suitable alignment algorithm, and may further account for secondary structures, such as self-complementarity within either the sca sequence or tracr sequence. In some embodiments, the degree of complementarity between the tracr sequence and sca sequence along the length of the shorter of the two when optimally aligned is about or more than about 25%, 30%, 40%, 50%, 60%, 70%, 80%, 90%, 95%, 97.5%, 99%, or higher.

[0179] In general, the CRISPR-Cas or CRISPR system may be as used in the foregoing documents, such as WO 2014/093622 (PCT/US2013/074667) and refers collectively to transcripts and other elements involved in the expression of or directing the activity of CRISPR-associated (“Cas”) genes, including sequences encoding a Cas gene, in particular a Cas13 gene in the case of CRISPR-Cas13, a tracr (trans-activating CRISPR) sequence (e.g. tracrRNA or an active partial tracrRNA), a tracr-mate sequence (encompassing a “direct repeat” and a tracrRNA-processed partial direct repeat in the context of an endogenous CRISPR system), a guide sequence (also referred to as a “spacer” in the context of an endogenous CRISPR system), or “RNA(s)” as that term is herein used (e.g., RNA(s) to guide Cas13, e.g. CRISPR RNA and transactivating (tracr) RNA or a single guide RNA (sgRNA) (chimeric RNA)) or other sequences and transcripts from a CRISPR locus. In general, a CRISPR system is characterized by elements that promote the formation of a CRISPR complex at the site of a target sequence (also referred to as a protospacer in the context of an endogenous CRISPR system). In the context of formation of a CRISPR complex, “target sequence” refers to a sequence to which a guide sequence is designed to have complementarity, where hybridization between a target sequence and a guide sequence promotes the formation of a CRISPR complex. The section of the guide sequence through which complementarity to the target sequence is important for cleavage activity is referred to herein as the seed sequence. A target sequence may comprise any polynucleotide, such as DNA or RNA polynucleotides. In some embodiments, a target sequence is located in the nucleus or cytoplasm of a cell, and may include nucleic acids in or from mitochondrial, organelles, vesicles, liposomes or particles present within the cell. In some embodiments, especially for non-nuclear uses, NLSs are not preferred. In some embodiments, a CRISPR system comprises one or more nuclear exports signals (NESs). In some embodiments, a CRISPR system comprises one or more NLSs and one or more NESs. In some embodiments, direct repeats may be identified in silico by searching for repetitive motifs that fulfill any or all of the following criteria: 1. found in a 2 Kb window of genomic sequence flanking the type II CRISPR locus; 2. span from 20 to 50 bp; and 3. interspaced by 20 to 50 bp. In some embodiments, 2 of these criteria may be used, for instance 1 and 2, 2 and 3, or 1 and 3. In some embodiments, all 3 criteria may be used.

[0180] In embodiments of the invention the terms guide sequence and guide RNA, i.e. RNA capable of guiding Cas to a target genomic locus, are used interchangeably as in foregoing cited documents such as WO 2014/093622 (PCT/US2013/074667). In general, a guide sequence is any polynucleotide sequence having sufficient complementarity with a target polynucleotide sequence to hybridize with the target sequence and direct sequence-specific binding of a CRISPR complex to the target sequence. In some embodiments, the degree of complementarity between a guide sequence and its corresponding target sequence, when optimally aligned using a suitable alignment algorithm, is about or more than about 50%, 60%, 75%, 80%, 85%, 90%, 95%, 97.5%, 99%, or more. Optimal alignment may be determined with the use of any suitable algorithm for aligning sequences, non-limiting example of which include the Smith-Waterman algorithm, the Needleman-Wunsch algorithm, algorithms based on the Burrows-Wheeler Transform (e.g. the Burrows Wheeler Aligner), ClustalW, Clustal X, BLAT, Novoalign (Novocraft Technologies; available at www.novocraft.com), ELAND (Illumina, San Diego, Calif.), SOAP (available at soap.genomics.org.cn), and Maq (available at maq.sourceforge.net). In some embodiments, a guide sequence is about or more than about 5, 10, 11, 12, 13, 14, 15, 16, 17, 18, 19, 20, 21, 22, 23, 24, 25, 26, 27, 28, 29, 30, 35, 40, 45, 50, 75, or more nucleotides in length. In some embodiments, a guide sequence is less than about 75, 50, 45, 40, 35, 30, 25, 20, 15, 12, or fewer nucleotides in length. Preferably the guide sequence is 10 30 nucleotides long. The ability of a guide sequence to direct sequence-specific binding of a CRISPR complex to a target sequence may be assessed by any suitable assay. For example, the components of a CRISPR system sufficient to form a CRISPR complex, including the guide sequence to be tested, may be provided to a host cell having the corresponding target sequence, such as by transfection with vectors encoding the components of the CRISPR sequence, followed by an assessment of preferential cleavage within the target sequence, such as by Surveyor assay as described herein. Similarly, cleavage of a target polynucleotide sequence may be evaluated in a test tube by providing the target sequence, components of a CRISPR complex, including the guide sequence to be tested and a control guide sequence different from the test guide sequence, and comparing binding or rate of cleavage at the target sequence between the test and control guide sequence reactions. Other assays are possible, and will occur to those skilled in the art.

[0181] In some embodiments of CRISPR-Cas systems, the degree of complementarity between a guide sequence and its corresponding target sequence can be about or more than about 50%, 60%, 75%, 80%, 85%, 90%, 95%, 97.5%, 99%, or 100%; a guide or RNA or sgRNA can be about or more than about 5, 10, 11, 12, 13, 14, 15, 16, 17, 18, 19, 20, 21, 22, 23, 24, 25, 26, 27, 28, 29, 30, 35, 40, 45, 50, 75, or more nucleotides in length; or guide or RNA or sgRNA can be less than about 75, 50, 45, 40, 35, 30, 25, 20, 15, 12, or fewer nucleotides in length; and advantageously tracr RNA is 30 or 50 nucleotides in length. However, an aspect of the invention is to reduce off-target interactions, e.g., reduce the guide interacting with a target sequence having low complementarity. Indeed, in the examples, it is shown that the invention involves mutations that result in the CRISPR-Cas system being able to distinguish between target and off-target sequences that have greater than 80% to about 95% complementarity, e.g., 83%-84% or 88-89% or 94-95% complementarity (for instance, distinguishing between a target having 18 nucleotides from an off-target of 18 nucleotides having 1, 2 or 3 mismatches). Accordingly, in the context of the present invention the degree of complementarity between a guide sequence and its corresponding target sequence is greater than 94.5% or 95% or 95.5% or 96% or 96.5% or 97% or 97.5% or 98% or 98.5% or 99% or 99.5% or 99.9%, or 100%. Off target is less than 100% or 99.9% or 99.5% or 99% or 99% or 98.5% or 98% or 97.5% or 97% or 96.5% or 96% or 95.5% or 95% or 94.5% or 94% or 93% or 92% or 91% or 90% or 89% or 88% or 87% or 86% or 85% or 84% or 83% or 82% or 81% or 80% complementarity between the sequence and the guide, with it advantageous that off target is 100% or 99.9% or 99.5% or 99% or 99% or 98.5% or 98% or 97.5% or 97% or 96.5% or 96% or 95.5% or 95% or 94.5% complementarity between the sequence and the guide.

[0182] In particularly preferred embodiments according to the invention, the guide RNA (capable of guiding Cas to a target locus) may comprise (1) a guide sequence capable of hybridizing to a genomic target locus in the eukaryotic cell; (2) a tracr sequence; and (3) a tracr mate sequence. All (1) to (3) may reside in a single RNA, i.e. an sgRNA (arranged in a 5′ to 3′ orientation), or the tracr RNA may be a different RNA than the RNA containing the guide and tracr sequence. The tracr hybridizes to the tracr mate sequence and directs the CRISPR/Cas complex to the target sequence. Where the tracr RNA is on a different RNA than the RNA containing the guide and tracr sequence, the length of each RNA may be optimized to be shortened from their respective native lengths, and each may be independently chemically modified to protect from degradation by cellular RNase or otherwise increase stability.

[0183] The methods according to the invention as described herein comprehend inducing one or more mutations in a eukaryotic cell (in vitro, i.e. in an isolated eukaryotic cell) as herein discussed comprising delivering to cell a vector as herein discussed. The mutation(s) can include the introduction, deletion, or substitution of one or more nucleotides at each target sequence of cell(s) via the guide(s) RNA(s) or sgRNA(s). The mutations can include the introduction, deletion, or substitution of 1-75 nucleotides at each target sequence of said cell(s) via the guide(s) RNA(s) or sgRNA(s). The mutations can include the introduction, deletion, or substitution of 1, 5, 10, 11, 12, 13, 14, 15, 16, 17, 18, 19, 20, 21, 22, 23, 24, 25, 26, 27, 28, 29, 30, 35, 40, 45, 50, or 75 nucleotides at each target sequence of said cell(s) via the guide(s) RNA(s) or sgRNA(s). The mutations can include the introduction, deletion, or substitution of 5, 10, 11, 12, 13, 14, 15, 16, 17, 18, 19, 20, 21, 22, 23, 24, 25, 26, 27, 28, 29, 30, 35, 40, 45, 50, or 75 nucleotides at each target sequence of said cell(s) via the guide(s) RNA(s) or sgRNA(s). The mutations include the introduction, deletion, or substitution of 10, 11, 12, 13, 14, 15, 16, 17, 18, 19, 20, 21, 22, 23, 24, 25, 26, 27, 28, 29, 30, 35, 40, 45, 50, or 75 nucleotides at each target sequence of said cell(s) via the guide(s) RNA(s) or sgRNA(s). The mutations can include the introduction, deletion, or substitution of 20, 21, 22, 23, 24, 25, 26, 27, 28, 29, 30, 35, 40, 45, 50, or 75 nucleotides at each target sequence of said cell(s) via the guide(s) RNA(s) or sgRNA(s). The mutations can include the introduction, deletion, or substitution of 40, 45, 50, 75, 100, 200, 300, 400 or 500 nucleotides at each target sequence of said cell(s) via the guide(s) RNA(s) or sgRNA(s).

[0184] For minimization of toxicity and off-target effect, it may be important to control the concentration of Cas mRNA and guide RNA delivered. Optimal concentrations of Cas mRNA and guide RNA can be determined by testing different concentrations in a cellular or non-human eukaryote animal model and using deep sequencing the analyze the extent of modification at potential off-target genomic loci. Alternatively, to minimize the level of toxicity and off-target effect, Cas nickase mRNA (for example S. pyogenes Cas9 with the D10A mutation) can be delivered with a pair of guide RNAs targeting a site of interest. Guide sequences and strategies to minimize toxicity and off-target effects can be as in WO 2014/093622 (PCT/US2013/074667); or, via mutation as herein.

[0185] Typically, in the context of an endogenous CRISPR system, formation of a CRISPR complex (comprising a guide sequence hybridized to a target sequence and complexed with one or more Cas proteins) results in cleavage of one or both strands in or near (e.g. within 1, 2, 3, 4, 5, 6, 7, 8, 9, 10, 20, 50, or more base pairs from) the target sequence. Without wishing to be bound by theory, the tracr sequence, which may comprise or consist of all or a portion of a wild-type tracr sequence (e.g. about or more than about 20, 26, 32, 45, 48, 54, 63, 67, 85, or more nucleotides of a wild-type tracr sequence), may also form part of a CRISPR complex, such as by hybridization along at least a portion of the tracr sequence to all or a portion of a tracr mate sequence that is operably linked to the guide sequence.

### Guide Modifications

[0186] In certain embodiments, guides of the invention comprise non-naturally occurring nucleic acids and/or non-naturally occurring nucleotides and/or nucleotide analogs, and/or chemically modifications. Non-naturally occurring nucleic acids can include, for example, mixtures of naturally and non-naturally occurring nucleotides. Non-naturally occurring nucleotides and/or nucleotide analogs may be modified at the ribose, phosphate, and/or base moiety. In an embodiment of the invention, a guide nucleic acid comprises ribonucleotides and non-ribonucleotides. In one such embodiment, a guide comprises one or more ribonucleotides and one or more deoxyribonucleotides. In an embodiment of the invention, the guide comprises one or more non-naturally occurring nucleotide or nucleotide analog such as a nucleotide with phosphorothioate linkage, boranophosphate linkage, a locked nucleic acid (LNA) nucleotides comprising a methylene bridge between the 2,Ä≤ and 4,Ä≤ carbons of the ribose ring, peptide nucleic acids (PNA), or bridged nucleic acids (BNA). Other examples of modified nucleotides include 2′-O-methyl analogs, 2′-deoxy analogs, 2-thiouridine analogs, N6-methyladenosine analogs, or 2′-fluoro analogs. Further examples of modified nucleotides include linkage of chemical moieties at the 2′ position, including but not limited to peptides, nuclear localization sequence (NLS), peptide nucleic acid (PNA), polyethylene glycol (PEG), triethylene glycol, or tetraethyleneglycol (TEG). Further examples of modified bases include, but are not limited to, 2-aminopurine, 5-bromo-uridine, pseudouridine ( [symbol] ®), N1-methylpseudouridine (mel [symbol] ®), 5-methoxyuridine (5moU), inosine, 7-methylguanosine. Examples of guide RNA chemical modifications include, without limitation, incorporation of 2′-O-methyl (M), 2′-O-methyl-3′-phosphorothioate (MS), phosphorothioate (PS), S-constrained ethyl (cEt), 2′-O-methyl-3′-thioPACE (MSP), or 2′-O-methyl-3′-phosphonoacetate (MP) at one or more terminal nucleotides. Such chemically modified guides can comprise increased stability and increased activity as compared to unmodified guides, though on-target vs. off-target specificity is not predictable. (See, Hendel, 2015, Nat Biotechnol. 33(9):985-9, doi: 10.1038/nbt.3290, published online 29 Jun. 2015; Ragdarm et al., 0215, PNAS, E7110-E7111; Allerson et al., J. Med. Chem. 2005, 48:901-904; Bramsen et al., Front. Genet., 2012, 3:154; Deng et al., PNAS, 2015, 112:11870-11875; Sharma et al., Med Chem Comm., 2014, 5:1454-1471; Hendel et al., Nat. Biotechnol. (2015) 33(9): 985-989; Li et al., Nature Biomedical Engineering, 2017, 1, 0066 DOI:10.1038/s41551-017-0066; Ryan et al., Nucleic Acids Res. (2018) 46(2): 792-803). In some embodiments, the 5′ and/or 3′ end of a guide RNA is modified by a variety of functional moieties including fluorescent dyes, polyethylene glycol, cholesterol, proteins, or detection tags. (See Kelly et al., 2016, J. Biotech. 233:74-83). In certain embodiments, a guide comprises ribonucleotides in a region that binds to a target DNA and one or more deoxyribonucletides and/or nucleotide analogs in a region that binds to Cas9, Cpf1, C2c1, or Cas13. In an embodiment of the invention, deoxyribonucleotides and/or nucleotide analogs are incorporated in engineered guide structures, such as, without limitation, 5′ and/or 3′ end, stem-loop regions, and the seed region. In certain embodiments, the modification is not in the 5′-handle of the stem-loop regions. Chemical modification in the 5′-handle of the stem-loop region of a guide may abolish its function (see Li, et al., Nature Biomedical Engineering, 2017, 1:0066). In certain embodiments, at least 1, 2, 3, 4, 5, 6, 7, 8, 9, 10, 11, 12, 13, 14, 15, 16, 17, 18, 19, 20, 21, 22, 23, 24, 25, 26, 27, 28, 29, 30, 35, 40, 45, 50, or 75 nucleotides of a guide is chemically modified. In some embodiments, 3-5 nucleotides at either the 3′ or the 5′ end of a guide is chemically modified. In some embodiments, only minor modifications are introduced in the seed region, such as 2′-F modifications. In some embodiments, 2′-F modification is introduced at the 3′ end of a guide. In certain embodiments, three to five nucleotides at the 5′ and/or the 3′ end of the guide are chemically modified with 2′-O-methyl (M), 2′-O-methyl-3′-phosphorothioate (MS), S-constrained ethyl(cEt), 2′-O-methyl-3′-thioPACE (MSP), or 2′-O-methyl-3′-phosphonoacetate (MP). Such modification can enhance genome editing efficiency (see Hendel et al., Nat. Biotechnol. (2015) 33(9): 985-989; Ryan et al., Nucleic Acids Res. (2018) 46(2): 792-803). In certain embodiments, all of the phosphodiester bonds of a guide are substituted with phosphorothioates (PS) for enhancing levels of gene disruption. In certain embodiments, more than five nucleotides at the 5′ and/or the 3′ end of the guide are chemically modified with 2′-O-Me, 2′-F or S-constrained ethyl(cEt). Such chemically modified guide can mediate enhanced levels of gene disruption (see Ragdarm et al., 0215, PNAS, E7110-E7111). In an embodiment of the invention, a guide is modified to comprise a chemical moiety at its 3′ and/or 5′ end. Such moieties include, but are not limited to amine, azide, alkyne, thio, dibenzocyclooctyne (DBCO), Rhodamine, peptides, nuclear localization sequence (NLS), peptide nucleic acid (PNA), polyethylene glycol (PEG), triethylene glycol, or tetraethyleneglycol (TEG). In certain embodiment, the chemical moiety is conjugated to the guide by a linker, such as an alkyl chain. In certain embodiments, the chemical moiety of the modified guide can be used to attach the guide to another molecule, such as DNA, RNA, protein, or nanoparticles. Such chemically modified guide can be used to identify or enrich cells generically edited by a CRISPR system (see Lee et al., eLife, 2017, 6:e25312, DOI:10.7554). In some embodiments, 3 nucleotides at each of the 3′ and 5′ ends are chemically modified. In a specific embodiment, the modifications comprise 2′-O-methyl or phosphorothioate analogs. In a specific embodiment, 12 nucleotides in the tetraloop and 16 nucleotides in the stem-loop region are replaced with 2′-O-methyl analogs. Such chemical modifications improve in vivo editing and stability (see Finn et al., Cell Reports (2018), 22: 2227-2235). In some embodiments, more than 60 or 70 nucleotides of the guide are chemically modified. In some embodiments, this modification comprises replacement of nucleotides with 2′-O-methyl or 2′-fluoro nucleotide analogs or phosphorothioate (PS) modification of phosphodiester bonds. In some embodiments, the chemical modification comprises 2′-O-methyl or 2′-fluoro modification of guide nucleotides extending outside of the nuclease protein when the CRISPR complex is formed or PS modification of 20 to 30 or more nucleotides of the 3′-terminus of the guide. In a particular embodiment, the chemical modification further comprises 2′-O-methyl analogs at the 5′ end of the guide or 2′-fluoro analogs in the seed and tail regions. Such chemical modifications improve stability to nuclease degradation and maintain or enhance genome-editing activity or efficiency, but modification of all nucleotides may abolish the function of the guide (see Yin et al., Nat. Biotech. (2018), 35(12): 1179-1187). Such chemical modifications may be guided by knowledge of the structure of the CRISPR complex, including knowledge of the limited number of nuclease and RNA 2′-OH interactions (see Yin et al., Nat. Biotech. (2018), 35(12): 1179-1187). In some embodiments, one or more guide RNA nucleotides may be replaced with DNA nucleotides. In some embodiments, up to 2, 4, 6, 8, 10, or 12 RNA nucleotides of the 5′-end tail/seed guide region are replaced with DNA nucleotides. In certain embodiments, the majority of guide RNA nucleotides at the 3′ end are replaced with DNA nucleotides. In particular embodiments, 16 guide RNA nucleotides at the 3′ end are replaced with DNA nucleotides. In particular embodiments, 8 guide RNA nucleotides of the 5′-end tail/seed region and 16 RNA nucleotides at the 3′ end are replaced with DNA nucleotides. In particular embodiments, guide RNA nucleotides that extend outside of the nuclease protein when the CRISPR complex is formed are replaced with DNA nucleotides. Such replacement of multiple RNA nucleotides with DNA nucleotides leads to decreased off-target activity but similar on-target activity compared to an unmodified guide; however, replacement of all RNA nucleotides at the 3′ end may abolish the function of the guide (see Yin et al., Nat. Chem. Biol. (2018) 14, 311-316). Such modifications may be guided by knowledge of the structure of the CRISPR complex, including knowledge of the limited number of nuclease and RNA 2′-OH interactions (see Yin et al., Nat. Chem. Biol. (2018) 14, 311-316).

[0187] In one aspect of the invention, the guide comprises a modified crRNA for Cpf1, having a 5′-handle and a guide segment further comprising a seed region and a 3′-terminus. In some embodiments, the modified guide can be used with a Cpf1 of any one of Acidaminococcus sp. BV3L6 Cpf1 (AsCpf1); Francisella tularensis subsp. Novicida U112 Cpf1 (FnCpf1); L. bacterium MC2017 Cpf1 (Lb3Cpf1); Butyrivibrio proteoclasticus Cpf1 (BpCpf1); Parcubacteria bacterium GWC2011_GWC2_44_17 Cpf1 (PbCpf1); Peregrinibacteria bacterium GW2011_GWA_33_10 Cpf1 (PeCpf1); Leptospira inadai Cpf1 (LiCpf1); Smithella sp. SC_K08D17 Cpf1 (SsCpf1); L. bacterium MA2020 Cpf1 (Lb2Cpf1); Porphyromonas crevioricanis Cpf1 (PcCpf1); Porphyromonas macacae Cpf1 (PmCpf1); Candidatus Methanoplasma termitum Cpf1 (CMtCpf1); Eubacterium eligens Cpf1 (EeCpf1); Moraxella bovoculi 237 Cpf1 (MbCpf1); Prevotella disiens Cpf1 (PdCpf1); or L. bacterium ND2006 Cpf1 (LbCpf1).

[0188] In some embodiments, the modification to the guide is a chemical modification, an insertion, a deletion or a split. In some embodiments, the chemical modification includes, but is not limited to, incorporation of 2′-O-methyl (M) analogs, 2′-deoxy analogs, 2-thiouridine analogs, N6-methyladenosine analogs, 2′-fluoro analogs, 2-aminopurine, 5-bromo-uridine, pseudouridine ( [symbol] ®), N1-methylpseudouridine (mel [symbol] ®), 5-methoxyuridine (5moU), inosine, 7-methylguanosine, 2′-O-methyl-3′-phosphorothioate (MS), S-constrained ethyl(cEt), phosphorothioate (PS), 2′-O-methyl-3′-thioPACE (MSP), or 2′-O-methyl-3′-phosphonoacetate (MP). In some embodiments, the guide comprises one or more of phosphorothioate modifications. In certain embodiments, at least 1, 2, 3, 4, 5, 6, 7, 8, 9, 10, 11, 12, 13, 14, 15, 16, 17, 18, 19, 20, or 25 nucleotides of the guide are chemically modified. In some embodiments, all nucleotides are chemically modified. In certain embodiments, one or more nucleotides in the seed region are chemically modified. In certain embodiments, one or more nucleotides in the 3′-terminus are chemically modified. In certain embodiments, none of the nucleotides in the 5′-handle is chemically modified. In some embodiments, the chemical modification in the seed region is a minor modification, such as incorporation of a 2′-fluoro analog. In a specific embodiment, one nucleotide of the seed region is replaced with a 2′-fluoro analog. In some embodiments, 5 or 10 nucleotides in the 3′-terminus are chemically modified. Such chemical modifications at the 3′-terminus of the Cpf1 CrRNA improve gene cutting efficiency (see Li, et al., Nature Biomedical Engineering, 2017, 1:0066). In a specific embodiment, 5 nucleotides in the 3′-terminus are replaced with 2′-fluoro analogues. In a specific embodiment, 10 nucleotides in the 3′-terminus are replaced with 2′-fluoro analogues. In a specific embodiment, 5 nucleotides in the 3′-terminus are replaced with 2′-O-methyl (M) analogs. In some embodiments, 3 nucleotides at each of the 3′ and 5′ ends are chemically modified. In a specific embodiment, the modifications comprise 2′-O-methyl or phosphorothioate analogs. In a specific embodiment, 12 nucleotides in the tetraloop and 16 nucleotides in the stem-loop region are replaced with 2′-O-methyl analogs. Such chemical modifications improve in vivo editing and stability (see Finn et al., Cell Reports (2018), 22: 2227-2235).

[0189] In some embodiments, the loop of the 5′-handle of the guide is modified. In some embodiments, the loop of the 5′-handle of the guide is modified to have a deletion, an insertion, a split, or chemical modifications. In certain embodiments, the loop comprises 3, 4, or 5 nucleotides. In certain embodiments, the loop comprises the sequence of UCUU, UUUU, UAUU, or UGUU. In some embodiments, the guide molecule forms a stemloop with a separate non-covalently linked sequence, which can be DNA or RNA.

### Synthetically Linked Guide

[0190] In one aspect, the guide comprises a tracr sequence and a tracr mate sequence that are chemically linked or conjugated via a non-phosphodiester bond. In one aspect, the guide comprises a tracr sequence and a tracr mate sequence that are chemically linked or conjugated via a non-nucleotide loop. In some embodiments, the tracr and tracr mate sequences are joined via a non-phosphodiester covalent linker. Examples of the covalent linker include but are not limited to a chemical moiety selected from the group consisting of carbamates, ethers, esters, amides, imines, amidines, aminotrizines, hydrozone, disulfides, thioethers, thioesters, phosphorothioates, phosphorodithioates, sulfonamides, sulfonates, fulfones, sulfoxides, ureas, thioureas, hydrazide, oxime, triazole, photolabile linkages, C—C bond forming groups such as Diels-Alder cyclo-addition pairs or ring-closing metathesis pairs, and Michael reaction pairs.

[0191] In some embodiments, the tracr and tracr mate sequences are first synthesized using the standard phosphoramidite synthetic protocol (Herdewijn, P., ed., Methods in Molecular Biology Col 288, Oligonucleotide Synthesis: Methods and Applications, Humana Press, New Jersey (2012)). In some embodiments, the tracr or tracr mate sequences can be functionalized to contain an appropriate functional group for ligation using the standard protocol known in the art (Hermanson, G. T., Bioconjugate Techniques, Academic Press (2013)). Examples of functional groups include, but are not limited to, hydroxyl, amine, carboxylic acid, carboxylic acid halide, carboxylic acid active ester, aldehyde, carbonyl, chlorocarbonyl, imidazolylcarbonyl, hydrozide, semicarbazide, thio semicarbazide, thiol, maleimide, haloalkyl, sufonyl, ally, propargyl, diene, alkyne, and azide. Once the tracr and the tracr mate sequences are functionalized, a covalent chemical bond or linkage can be formed between the two oligonucleotides. Examples of chemical bonds include, but are not limited to, those based on carbamates, ethers, esters, amides, imines, amidines, aminotrizines, hydrozone, disulfides, thioethers, thioesters, phosphorothioates, phosphorodithioates, sulfonamides, sulfonates, fulfones, sulfoxides, ureas, thioureas, hydrazide, oxime, triazole, photolabile linkages, C—C bond forming groups such as Diels-Alder cyclo-addition pairs or ring-closing metathesis pairs, and Michael reaction pairs.

[0192] In some embodiments, the tracr and tracr mate sequences can be chemically synthesized. In some embodiments, the chemical synthesis uses automated, solid-phase oligonucleotide synthesis machines with 2′-acetoxyethyl orthoester (2′-ACE) (Scaringe et al., J. Am. Chem. Soc. (1998) 120: 11820-11821; Scaringe, Methods Enzymol. (2000) 317: 3-18) or 2′-thionocarbamate (2′-TC) chemistry (Dellinger et al., J. Am. Chem. Soc. (2011) 133: 11540-11546; Hendel et al., Nat. Biotechnol. (2015) 33:985-989).

[0193] In some embodiments, the tracr and tracr mate sequences can be covalently linked using various bioconjugation reactions, loops, bridges, and non-nucleotide links via modifications of sugar, internucleotide phosphodiester bonds, purine and pyrimidine residues. Sletten et al., Angew. Chem. Int. Ed. (2009) 48:6974-6998; Manoharan, M. Curr. Opin. Chem. Biol. (2004) 8: 570-9; Behlke et al., Oligonucleotides (2008) 18: 305-19; Watts, et al., Drug. Discov. Today (2008) 13: 842-55; Shukla, et al., Chem Med Chem (2010) 5: 328-49.

[0194] In some embodiments, the tracr and tracr mate sequences can be covalently linked using click chemistry. In some embodiments, the tracr and tracr mate sequences can be covalently linked using a triazole linker. In some embodiments, the tracr and tracr mate sequences can be covalently linked using Huisgen 1,3-dipolar cycloaddition reaction involving an alkyne and azide to yield a highly stable triazole linker (He et al., Chem Bio Chem (2015) 17: 1809-1812; WO 2016/186745). In some embodiments, the tracr and tracr mate sequences are covalently linked by ligating a 5′-hexyne tracrRNA and a 3′-azide crRNA. In some embodiments, either or both of the 5′-hexyne tracrRNA and a 3′-azide crRNA can be protected with 2′-acetoxyethl orthoester (2′-ACE) group, which can be subsequently removed using Dharmacon protocol (Scaringe et al., J. Am. Chem. Soc. (1998) 120: 11820-11821; Scaringe, Methods Enzymol. (2000) 317: 3-18).

[0195] In some embodiments, the tracr and tracr mate sequences can be covalently linked via a linker (e.g., a non-nucleotide loop) that comprises a moiety such as spacers, attachments, bioconjugates, chromophores, reporter groups, dye labeled RNAs, and non-naturally occurring nucleotide analogues. More specifically, suitable spacers for purposes of this invention include, but are not limited to, polyethers (e.g., polyethylene glycols, polyalcohols, polypropylene glycol or mixtures of ethylene and propylene glycols), polyamines group (e.g., spennine, spermidine and polymeric derivatives thereof), polyesters (e.g., poly(ethyl acrylate)), polyphosphodiesters, alkylenes, and combinations thereof. Suitable attachments include any moiety that can be added to the linker to add additional properties to the linker, such as but not limited to, fluorescent labels. Suitable bioconjugates include, but are not limited to, peptides, glycosides, lipids, cholesterol, phospholipids, diacyl glycerols and dialkyl glycerols, fatty acids, hydrocarbons, enzyme substrates, steroids, biotin, digoxigenin, carbohydrates, polysaccharides. Suitable chromophores, reporter groups, and dye-labeled RNAs include, but are not limited to, fluorescent dyes such as fluorescein and rhodamine, chemiluminescent, electrochemiluminescent, and bioluminescent marker compounds. The design of example linkers conjugating two RNA components are also described in WO 2004/015075.

[0196] The linker (e.g., a non-nucleotide loop) can be of any length. In some embodiments, the linker has a length equivalent to about 0-16 nucleotides. In some embodiments, the linker has a length equivalent to about 0-8 nucleotides. In some embodiments, the linker has a length equivalent to about 0-4 nucleotides. In some embodiments, the linker has a length equivalent to about 2 nucleotides. Example linker design is also described in WO2011/008730.

[0197] A typical Type II Cas sgRNA comprises (in 5′ to 3′ direction): a guide sequence, a poly U tract, a first complimentary stretch (the “repeat”), a loop (tetraloop), a second complimentary stretch (the “anti-repeat” being complimentary to the repeat), a stem, and further stem loops and stems and a poly A (often poly U in RNA) tail (terminator). In preferred embodiments, certain aspects of guide architecture are retained, certain aspect of guide architecture cam be modified, for example by addition, subtraction, or substitution of features, whereas certain other aspects of guide architecture are maintained. Preferred locations for engineered sgRNA modifications, including but not limited to insertions, deletions, and substitutions include guide termini and regions of the sgRNA that are exposed when complexed with CRISPR protein and/or target, for example the tetraloop and/or loop2.

[0198] In certain embodiments, guides of the invention comprise specific binding sites (e.g. aptamers) for adapter proteins, which may comprise one or more functional domains (e.g. via fusion protein). When such a guide forms a CRISPR complex (i.e. CRISPR enzyme binding to guide and target) the adapter proteins bind and, the functional domain associated with the adapter protein is positioned in a spatial orientation which is advantageous for the attributed function to be effective. For example, if the functional domain is a transcription activator (e.g. VP64 or p65), the transcription activator is placed in a spatial orientation which allows it to affect the transcription of the target. Likewise, a transcription repressor will be advantageously positioned to affect the transcription of the target and a nuclease (e.g. Fok1) will be advantageously positioned to cleave or partially cleave the target.

[0199] The skilled person will understand that modifications to the guide which allow for binding of the adapter+functional domain but not proper positioning of the adapter+functional domain (e.g. due to steric hindrance within the three dimensional structure of the CRISPR complex) are modifications which are not intended. The one or more modified guide may be modified at the tetra loop, the stem loop 1, stem loop 2, or stem loop 3, as described herein, preferably at either the tetra loop or stem loop 2, and most preferably at both the tetra loop and stem loop 2.

[0200] The repeat:anti repeat duplex will be apparent from the secondary structure of the sgRNA. It may be typically a first complimentary stretch after (in 5′ to 3′ direction) the poly U tract and before the tetraloop; and a second complimentary stretch after (in 5′ to 3′ direction) the tetraloop and before the poly A tract. The first complimentary stretch (the “repeat”) is complimentary to the second complimentary stretch (the “anti-repeat”). As such, they Watson-Crick base pair to form a duplex of dsRNA when folded back on one another. As such, the anti-repeat sequence is the complimentary sequence of the repeat and in terms to A-U or C-G base pairing, but also in terms of the fact that the anti-repeat is in the reverse orientation due to the tetraloop.

[0201] In an embodiment of the invention, modification of guide architecture comprises replacing bases in stemloop 2. For example, in some embodiments, “actt” (“acuu” in RNA) and “aagt” (“aagu” in RNA) bases in stemloop2 are replaced with “cgcc” and “gcgg”. In some embodiments, “actt” and “aagt” bases in stemloop2 are replaced with complimentary GC-rich regions of 4 nucleotides. In some embodiments, the complimentary GC-rich regions of 4 nucleotides are “cgcc” and “gcgg” (both in 5′ to 3′ direction). In some embodiments, the complimentary GC-rich regions of 4 nucleotides are “gcgg” and “cgcc” (both in 5′ to 3′ direction). Other combination of C and G in the complimentary GC-rich regions of 4 nucleotides will be apparent including CCCC and GGGG.

[0202] In one aspect, the stemloop 2, e.g., “ACTTgtttAAGT” can be replaced by any “XXXXgtttYYYY”, e.g., where XXXX and YYYY represent any complementary sets of nucleotides that together will base pair to each other to create a stem.

[0203] In one aspect, the stem comprises at least about 4 bp comprising complementary X and Y sequences, although stems of more, e.g., 5, 6, 7, 8, 9, 10, 11 or 12 or fewer, e.g., 3, 2, base pairs are also contemplated. Thus, for example X2-12 and Y2-12 (wherein X and Y represent any complementary set of nucleotides) may be contemplated. In one aspect, the stem made of the X and Y nucleotides, together with the “gttt,” will form a complete hairpin in the overall secondary structure; and, this may be advantageous and the amount of base pairs can be any amount that forms a complete hairpin. In one aspect, any complementary X:Y basepairing sequence (e.g., as to length) is tolerated, so long as the secondary structure of the entire sgRNA is preserved. In one aspect, the stem can be a form of X:Y basepairing that does not disrupt the secondary structure of the whole sgRNA in that it has a DR:tracr duplex, and 3 stemloops. In one aspect, the “gttt” tetraloop that connects ACTT and AAGT (or any alternative stem made of X:Y basepairs) can be any sequence of the same length (e.g., 4 basepair) or longer that does not interrupt the overall secondary structure of the sgRNA. In one aspect, the stemloop can be something that further lengthens stemloop2, e.g. can be MS2 aptamer. In one aspect, the stemloop3 “GGCACCGagtCGGTGC” can likewise take on a “XXXXXXXagtYYYYYYY” form, e.g., wherein X7 and Y7 represent any complementary sets of nucleotides that together will base pair to each other to create a stem. In one aspect, the stem comprises about 7 bp comprising complementary X and Y sequences, although stems of more or fewer basepairs are also contemplated. In one aspect, the stem made of the X and Y nucleotides, together with the “agt”, will form a complete hairpin in the overall secondary structure. In one aspect, any complementary X:Y basepairing sequence is tolerated, so long as the secondary structure of the entire sgRNA is preserved. In one aspect, the stem can be a form of X:Y basepairing that doesn't disrupt the secondary structure of the whole sgRNA in that it has a DR:tracr duplex, and 3 stemloops. In one aspect, the “agt” sequence of the stemloop 3 can be extended or be replaced by an aptamer, e.g., a MS2 aptamer or sequence that otherwise generally preserves the architecture of stemloop3. In one aspect for alternative Stemloops 2 and/or 3, each X and Y pair can refer to any basepair. In one aspect, non-Watson Crick basepairing is contemplated, where such pairing otherwise generally preserves the architecture of the stemloop at that position.

[0204] In one aspect, the DR:tracrRNA duplex can be replaced with the form: gYYYYag(N)NNNNxxxxNNNN(AAN)uuRRRRu (using standard IUPAC nomenclature for nucleotides), wherein (N) and (AAN) represent part of the bulge in the duplex, and “xxxx” represents a linker sequence. NNNN on the direct repeat can be anything so long as it basepairs with the corresponding NNNN portion of the tracrRNA. In one aspect, the DR:tracrRNA duplex can be connected by a linker of any length (xxxx . . . ), any base composition, as long as it doesn't alter the overall structure.

[0205] In one aspect, the sgRNA structural requirement is to have a duplex and 3 stemloops. In most aspects, the actual sequence requirement for many of the particular base requirements are lax, in that the architecture of the DR:tracrRNA duplex should be preserved, but the sequence that creates the architecture, i.e., the stems, loops, bulges, etc., may be altered.

### Aptamers

[0206] One guide with a first aptamer/RNA-binding protein pair can be linked or fused to an activator, whilst a second guide with a second aptamer/RNA-binding protein pair can be linked or fused to a repressor. The guides are for different targets (loci), so this allows one gene to be activated and one repressed. For example, the following schematic shows such an approach:

[0207] Guide 1—MS2 aptamer - - - MS2 RNA-binding protein - - - VP64 activator; and

[0208] Guide 2—PP7 aptamer - - - PP7 RNA-binding protein - - - SID4× repressor.

[0209] The present invention also relates to orthogonal PP7/MS2 gene targeting. In this example, sgRNA targeting different loci are modified with distinct RNA loops in order to recruit MS2-VP64 or PP7-SID4X, which activate and repress their target loci, respectively. PP7 is the RNA-binding coat protein of the bacteriophage Pseudomonas. Like MS2, it binds a specific RNA sequence and secondary structure. The PP7 RNA-recognition motif is distinct from that of MS2. Consequently, PP7 and MS2 can be multiplexed to mediate distinct effects at different genomic loci simultaneously. For example, an sgRNA targeting locus A can be modified with MS2 loops, recruiting MS2-VP64 activators, while another sgRNA targeting locus B can be modified with PP7 loops, recruiting PP7-SID4× repressor domains. In the same cell, dCas13 can thus mediate orthogonal, locus-specific modifications. This principle can be extended to incorporate other orthogonal RNA-binding proteins such as Q-beta.

[0210] An alternative option for orthogonal repression includes incorporating non-coding RNA loops with transactive repressive function into the guide (either at similar positions to the MS2/PP7 loops integrated into the guide or at the 3′ terminus of the guide). For instance, guides were designed with non-coding (but known to be repressive) RNA loops (e.g. using the Alu repressor (in RNA) that interferes with RNA polymerase II in mammalian cells). The Alu RNA sequence was located: in place of the MS2 RNA sequences as used herein (e.g. at tetraloop and/or stem loop 2); and/or at 3′ terminus of the guide. This gives possible combinations of MS2, PP7 or Alu at the tetraloop and/or stemloop 2 positions, as well as, optionally, addition of Alu at the 3′ end of the guide (with or without a linker).

[0211] The use of two different aptamers (distinct RNA) allows an activator-adaptor protein fusion and a repressor-adaptor protein fusion to be used, with different guides, to activate expression of one gene, whilst repressing another. They, along with their different guides can be administered together, or substantially together, in a multiplexed approach. A large number of such modified guides can be used all at the same time, for example 10 or 20 or 30 and so forth, whilst only one (or at least a minimal number) of Cas13s to be delivered, as a comparatively small number of Cas13s can be used with a large number modified guides. The adaptor protein may be associated (preferably linked or fused to) one or more activators or one or more repressors. For example, the adaptor protein may be associated with a first activator and a second activator. The first and second activators may be the same, but they are preferably different activators. For example, one might be VP64, whilst the other might be p65, although these are just examples and other transcriptional activators are envisaged. Three or more or even four or more activators (or repressors) may be used, but package size may limit the number being higher than 5 different functional domains. Linkers are preferably used, over a direct fusion to the adaptor protein, where two or more functional domains are associated with the adaptor protein. Suitable linkers might include the GlySer linker.

[0212] It is also envisaged that the enzyme-guide complex as a whole may be associated with two or more functional domains. For example, there may be two or more functional domains associated with the enzyme, or there may be two or more functional domains associated with the guide (via one or more adaptor proteins), or there may be one or more functional domains associated with the enzyme and one or more functional domains associated with the guide (via one or more adaptor proteins).

[0213] The fusion between the adaptor protein and the activator or repressor may include a linker. For example, GlySer linkers GGGS can be used. They can be used in repeats of 3 ((GGGGS)3) or 6, 9 or even 12 or more, to provide suitable lengths, as required. Linkers can be used between the RNA-binding protein and the functional domain (activator or repressor), or between the CRISPR Enzyme (Cas13) and the functional domain (activator or repressor). The linkers the user to engineer appropriate amounts of “mechanical flexibility”.

### Dead Guides: Guide RNAs Comprising a Dead Guide Sequence May be Used in the Present Invention

[0214] In one aspect, the invention provides guide sequences which are modified in a manner which allows for formation of the CRISPR complex and successful binding to the target, while at the same time, not allowing for successful nuclease activity (i.e. without nuclease activity/without indel activity). For matters of explanation such modified guide sequences are referred to as “dead guides” or “dead guide sequences”. These dead guides or dead guide sequences can be thought of as catalytically inactive or conformationally inactive with regard to nuclease activity. Nuclease activity may be measured using surveyor analysis or deep sequencing as commonly used in the art, preferably surveyor analysis. Similarly, dead guide sequences may not sufficiently engage in productive base pairing with respect to the ability to promote catalytic activity or to distinguish on-target and off-target binding activity. Briefly, the surveyor assay involves purifying and amplifying a CRISPR target site for a gene and forming heteroduplexes with primers amplifying the CRISPR target site. After re-anneal, the products are treated with SURVEYOR nuclease and SURVEYOR enhancer S (Transgenomics) following the manufacturer's recommended protocols, analyzed on gels, and quantified based upon relative band intensities.

[0215] Hence, in a related aspect, the invention provides a non-naturally occurring or engineered composition Cas13 CRISPR-Cas system comprising a functional Cas13 as described herein, and guide RNA (gRNA) wherein the gRNA comprises a dead guide sequence whereby the gRNA is capable of hybridizing to a target sequence such that the Cas13 CRISPR-Cas system is directed to a genomic locus of interest in a cell without detectable indel activity resultant from nuclease activity of a non-mutant Cas13 enzyme of the system as detected by a SURVEYOR assay. For shorthand purposes, a gRNA comprising a dead guide sequence whereby the gRNA is capable of hybridizing to a target sequence such that the Cas13 CRISPR-Cas system is directed to a genomic locus of interest in a cell without detectable indel activity resultant from nuclease activity of a non-mutant Cas13 enzyme of the system as detected by a SURVEYOR assay is herein termed a “dead gRNA”. It is to be understood that any of the gRNAs according to the invention as described herein elsewhere may be used as dead gRNAs/gRNAs comprising a dead guide sequence as described herein below. Any of the methods, products, compositions and uses as described herein elsewhere is equally applicable with the dead gRNAs/gRNAs comprising a dead guide sequence as further detailed below. By means of further guidance, the following particular aspects and embodiments are provided.

[0216] The ability of a dead guide sequence to direct sequence-specific binding of a CRISPR complex to a target sequence may be assessed by any suitable assay. For example, the components of a CRISPR system sufficient to form a CRISPR complex, including the dead guide sequence to be tested, may be provided to a host cell having the corresponding target sequence, such as by transfection with vectors encoding the components of the CRISPR sequence, followed by an assessment of preferential cleavage within the target sequence, such as by Surveyor assay as described herein. Similarly, cleavage of a target polynucleotide sequence may be evaluated in a test tube by providing the target sequence, components of a CRISPR complex, including the dead guide sequence to be tested and a control guide sequence different from the test dead guide sequence, and comparing binding or rate of cleavage at the target sequence between the test and control guide sequence reactions. Other assays are possible, and will occur to those skilled in the art. A dead guide sequence may be selected to target any target sequence. In some embodiments, the target sequence is a sequence within a genome of a cell.

[0217] As explained further herein, several structural parameters allow for a proper framework to arrive at such dead guides. Dead guide sequences are shorter than respective guide sequences which result in active Cas13-specific indel formation. Dead guides are 5%, 10%, 20%, 30%, 40%, 50%, shorter than respective guides directed to the same Cas13 leading to active Cas13-specific indel formation.

[0218] As explained below and known in the art, one aspect of gRNA—Cas specificity is the direct repeat sequence, which is to be appropriately linked to such guides. In particular, this implies that the direct repeat sequences are designed dependent on the origin of the Cas. Thus, structural data available for validated dead guide sequences may be used for designing Cas specific equivalents. Structural similarity between, e.g., the orthologous nuclease domains RuvC of two or more Cas effector proteins may be used to transfer design equivalent dead guides. Thus, the dead guide herein may be appropriately modified in length and sequence to reflect such Cas specific equivalents, allowing for formation of the CRISPR complex and successful binding to the target, while at the same time, not allowing for successful nuclease activity.

[0219] The use of dead guides in the context herein as well as the state of the art provides a surprising and unexpected platform for network biology and/or systems biology in both in vitro, ex vivo, and in vivo applications, allowing for multiplex gene targeting, and in particular bidirectional multiplex gene targeting. Prior to the use of dead guides, addressing multiple targets, for example for activation, repression and/or silencing of gene activity, has been challenging and in some cases not possible. With the use of dead guides, multiple targets, and thus multiple activities, may be addressed, for example, in the same cell, in the same animal, or in the same patient. Such multiplexing may occur at the same time or staggered for a desired timeframe.

[0220] For example, the dead guides now allow for the first time to use gRNA as a means for gene targeting, without the consequence of nuclease activity, while at the same time providing directed means for activation or repression. Guide RNA comprising a dead guide may be modified to further include elements in a manner which allow for activation or repression of gene activity, in particular protein adaptors (e.g. aptamers) as described herein elsewhere allowing for functional placement of gene effectors (e.g. activators or repressors of gene activity). One example is the incorporation of aptamers, as explained herein and in the state of the art. By engineering the gRNA comprising a dead guide to incorporate protein-interacting aptamers (Konermann et al., “Genome-scale transcription activation by an engineered CRISPR-Cas9 complex,” doi:10.1038/nature14136, incorporated herein by reference), one may assemble a synthetic transcription activation complex consisting of multiple distinct effector domains. Such may be modeled after natural transcription activation processes. For example, an aptamer, which selectively binds an effector (e.g. an activator or repressor; dimerized MS2 bacteriophage coat proteins as fusion proteins with an activator or repressor), or a protein which itself binds an effector (e.g. activator or repressor) may be appended to a dead gRNA tetraloop and/or a stem-loop 2. In the case of MS2, the fusion protein MS2-VP64 binds to the tetraloop and/or stem-loop 2 and in turn mediates transcriptional up-regulation, for example for Neurog2. Other transcriptional activators are, for example, VP64. P65, HSF1, and MyoD1. By mere example of this concept, replacement of the MS2 stem-loops with PP7-interacting stem-loops may be used to recruit repressive elements.

[0221] Thus, one aspect is a gRNA of the invention which comprises a dead guide, wherein the gRNA further comprises modifications which provide for gene activation or repression, as described herein. The dead gRNA may comprise one or more aptamers. The aptamers may be specific to gene effectors, gene activators or gene repressors. Alternatively, the aptamers may be specific to a protein which in turn is specific to and recruits/binds a specific gene effector, gene activator or gene repressor. If there are multiple sites for activator or repressor recruitment, it is preferred that the sites are specific to either activators or repressors. If there are multiple sites for activator or repressor binding, the sites may be specific to the same activators or same repressors. The sites may also be specific to different activators or different repressors. The gene effectors, gene activators, gene repressors may be present in the form of fusion proteins.

[0222] In an embodiment, the dead gRNA as described herein or the Cas13 CRISPR-Cas complex as described herein includes a non-naturally occurring or engineered composition comprising two or more adaptor proteins, wherein each protein is associated with one or more functional domains and wherein the adaptor protein binds to the distinct RNA sequence(s) inserted into the at least one loop of the dead gRNA.

[0223] Hence, an aspect provides a non-naturally occurring or engineered composition comprising a guide RNA (gRNA) comprising a dead guide sequence capable of hybridizing to a target sequence in a genomic locus of interest in a cell, wherein the dead guide sequence is as defined herein, a Cas13 comprising at least one or more nuclear localization sequences, wherein the Cas13 optionally comprises at least one mutation wherein at least one loop of the dead gRNA is modified by the insertion of distinct RNA sequence(s) that bind to one or more adaptor proteins, and wherein the adaptor protein is associated with one or more functional domains; or, wherein the dead gRNA is modified to have at least one non-coding functional loop, and wherein the composition comprises two or more adaptor proteins, wherein the each protein is associated with one or more functional domains.

[0224] In certain embodiments, the adaptor protein is a fusion protein comprising the functional domain, the fusion protein optionally comprising a linker between the adaptor protein and the functional domain, the linker optionally including a GlySer linker.

[0225] In certain embodiments, the at least one loop of the dead gRNA is not modified by the insertion of distinct RNA sequence(s) that bind to the two or more adaptor proteins.

[0226] In certain embodiments, the one or more functional domains associated with the adaptor protein is a transcriptional activation domain.

[0227] In certain embodiments, the one or more functional domains associated with the adaptor protein is a transcriptional activation domain comprising VP64, p65, MyoD1, HSF1, RTA or SET7/9.

[0228] In certain embodiments, the one or more functional domains associated with the adaptor protein is a transcriptional repressor domain.

[0229] In certain embodiments, the transcriptional repressor domain is a KRAB domain.

[0230] In certain embodiments, the transcriptional repressor domain is a NuE domain, NcoR domain, SID domain or a SID4× domain.

[0231] In certain embodiments, at least one of the one or more functional domains associated with the adaptor protein have one or more activities comprising methylase activity, demethylase activity, transcription activation activity, transcription repression activity, transcription release factor activity, histone modification activity, DNA integration activity RNA cleavage activity, DNA cleavage activity or nucleic acid binding activity.

[0232] In certain embodiments, the DNA cleavage activity is due to a Fok1 nuclease.

[0233] In certain embodiments, the dead gRNA is modified so that, after dead gRNA binds the adaptor protein and further binds to the Cas13 and target, the functional domain is in a spatial orientation allowing for the functional domain to function in its attributed function.

[0234] In certain embodiments, the at least one loop of the dead gRNA is tetra loop and/or loop2. In certain embodiments, the tetra loop and loop 2 of the dead gRNA are modified by the insertion of the distinct RNA sequence(s).

[0235] In certain embodiments, the insertion of distinct RNA sequence(s) that bind to one or more adaptor proteins is an aptamer sequence. In certain embodiments, the aptamer sequence is two or more aptamer sequences specific to the same adaptor protein. In certain embodiments, the aptamer sequence is two or more aptamer sequences specific to different adaptor protein.

[0236] In certain embodiments, the adaptor protein comprises MS2, PP7, Qβ, F2, GA, fr, JP501, M12, R17, BZ13, JP34, JP500, KU1, M11, MX1, TW18, VK, SP, FI, ID2, NL95, TW19, AP205, ϕCb5, ϕCb8r, ϕCb12r, ϕCb23r, 7s, PRR1.

[0237] In certain embodiments, the cell is a eukaryotic cell. In certain embodiments, the eukaryotic cell is a mammalian cell, optionally a mouse cell. In certain embodiments, the mammalian cell is a human cell.

[0238] In certain embodiments, a first adaptor protein is associated with a p65 domain and a second adaptor protein is associated with a HSF1 domain.

[0239] In certain embodiments, the composition comprises a Cas13 CRISPR-Cas complex having at least three functional domains, at least one of which is associated with the Cas13 and at least two of which are associated with dead gRNA.

[0240] In certain embodiments, the composition further comprises a second gRNA, wherein the second gRNA is a live gRNA capable of hybridizing to a second target sequence such that a second Cas13 CRISPR-Cas system is directed to a second genomic locus of interest in a cell with detectable indel activity at the second genomic locus resultant from nuclease activity of the Cas13 enzyme of the system.

[0241] In certain embodiments, the composition further comprises a plurality of dead gRNAs and/or a plurality of live gRNAs.

[0242] One aspect of the invention is to take advantage of the modularity and customizability of the gRNA scaffold to establish a series of gRNA scaffolds with different binding sites (in particular aptamers) for recruiting distinct types of effectors in an orthogonal manner. Again, for matters of example and illustration of the broader concept, replacement of the MS2 stem-loops with PP7-interacting stem-loops may be used to bind/recruit repressive elements, enabling multiplexed bidirectional transcriptional control. Thus, in general, gRNA comprising a dead guide may be employed to provide for multiplex transcriptional control and preferred bidirectional transcriptional control. This transcriptional control is most preferred of genes. For example, one or more gRNA comprising dead guide(s) may be employed in targeting the activation of one or more target genes. At the same time, one or more gRNA comprising dead guide(s) may be employed in targeting the repression of one or more target genes. Such a sequence may be applied in a variety of different combinations, for example the target genes are first repressed and then at an appropriate period other targets are activated, or select genes are repressed at the same time as select genes are activated, followed by further activation and/or repression. As a result, multiple components of one or more biological systems may advantageously be addressed together.

[0243] In an aspect, the invention provides nucleic acid molecule(s) encoding dead gRNA or the Cas13 CRISPR-Cas complex or the composition as described herein.

[0244] In an aspect, the invention provides a vector system comprising: a nucleic acid molecule encoding dead guide RNA as defined herein. In certain embodiments, the vector system further comprises a nucleic acid molecule(s) encoding Cas13. In certain embodiments, the vector system further comprises a nucleic acid molecule(s) encoding (live) gRNA. In certain embodiments, the nucleic acid molecule or the vector further comprises regulatory element(s) operable in a eukaryotic cell operably linked to the nucleic acid molecule encoding the guide sequence (gRNA) and/or the nucleic acid molecule encoding Cas13 and/or the optional nuclear localization sequence(s).

[0245] In another aspect, structural analysis may also be used to study interactions between the dead guide and the active Cas nuclease that enable DNA binding, but no DNA cutting. In this way amino acids important for nuclease activity of Cas are determined. Modification of such amino acids allows for improved Cas enzymes used for gene editing.

[0246] A further aspect is combining the use of dead guides as explained herein with other applications of CRISPR, as explained herein as well as known in the art. For example, gRNA comprising dead guide(s) for targeted multiplex gene activation or repression or targeted multiplex bidirectional gene activation/repression may be combined with gRNA comprising guides which maintain nuclease activity, as explained herein. Such gRNA comprising guides which maintain nuclease activity may or may not further include modifications which allow for repression of gene activity (e.g. aptamers). Such gRNA comprising guides which maintain nuclease activity may or may not further include modifications which allow for activation of gene activity (e.g. aptamers). In such a manner, a further means for multiplex gene control is introduced (e.g. multiplex gene targeted activation without nuclease activity/without indel activity may be provided at the same time or in combination with gene targeted repression with nuclease activity).

[0247] For example, 1) using one or more gRNA (e.g. 1-50, 1-40, 1-30, 1-20, preferably 1-10, more preferably 1-5) comprising dead guide(s) targeted to one or more genes and further modified with appropriate aptamers for the recruitment of gene activators; 2) may be combined with one or more gRNA (e.g. 1-50, 1-40, 1-30, 1-20, preferably 1-10, more preferably 1-5) comprising dead guide(s) targeted to one or more genes and further modified with appropriate aptamers for the recruitment of gene repressors. 1) and/or 2) may then be combined with 3) one or more gRNA (e.g. 1-50, 1-40, 1-30, 1-20, preferably 1-10, more preferably 1-5) targeted to one or more genes. This combination can then be carried out in turn with 1)+2)+3) with 4) one or more gRNA (e.g. 1-50, 1-40, 1-30, 1-20, preferably 1-10, more preferably 1-5) targeted to one or more genes and further modified with appropriate aptamers for the recruitment of gene activators. This combination can then be carried in turn with 1)+2)+3)+4) with 5) one or more gRNA (e.g. 1-50, 1-40, 1-30, 1-20, preferably 1-10, more preferably 1-5) targeted to one or more genes and further modified with appropriate aptamers for the recruitment of gene repressors. As a result various uses and combinations are included in the invention. For example, combination 1)+2); combination 1)+3); combination 2)+3); combination 1)+2)+3); combination 1)+2)+3)+4); combination 1)+3)+4); combination 2)+3)+4); combination 1)+2)+4); combination 1)+2) +3)+4)+5); combination 1)+3)+4)+5); combination 2)+3)+4)+5); combination 1)+2)+4) +5); combination 1)+2)+3)+5); combination 1)+3)+5); combination 2)+3)+5); combination 1)+2)+5).

[0248] In an aspect, the invention provides an algorithm for designing, evaluating, or selecting a dead guide RNA targeting sequence (dead guide sequence) for guiding a Cas13 CRISPR-Cas system to a target gene locus. In particular, it has been determined that dead guide RNA specificity relates to and can be optimized by varying i) GC content and ii) targeting sequence length. In an aspect, the invention provides an algorithm for designing or evaluating a dead guide RNA targeting sequence that minimizes off-target binding or interaction of the dead guide RNA. In an embodiment of the invention, the algorithm for selecting a dead guide RNA targeting sequence for directing a CRISPR system to a gene locus in an organism comprises a) locating one or more CRISPR motifs in the gene locus, analyzing the 20 nt sequence downstream of each CRISPR motif by i) determining the GC content of the sequence; and ii) determining whether there are off-target matches of the 15 downstream nucleotides nearest to the CRISPR motif in the genome of the organism, and c) selecting the 15 nucleotide sequence for use in a dead guide RNA if the GC content of the sequence is 70% or less and no off-target matches are identified. In an embodiment, the sequence is selected for a targeting sequence if the GC content is 60% or less. In certain embodiments, the sequence is selected for a targeting sequence if the GC content is 55% or less, 50% or less, 45% or less, 40% or less, 35% or less or 30% or less. In an embodiment, two or more sequences of the gene locus are analyzed and the sequence having the lowest GC content, or the next lowest GC content, or the next lowest GC content is selected. In an embodiment, the sequence is selected for a targeting sequence if no off-target matches are identified in the genome of the organism. In an embodiment, the targeting sequence is selected if no off-target matches are identified in regulatory sequences of the genome.

[0249] In an aspect, the invention provides a method of selecting a dead guide RNA targeting sequence for directing a functionalized CRISPR system to a gene locus in an organism, which comprises: a) locating one or more CRISPR motifs in the gene locus; b) analyzing the 20 nt sequence downstream of each CRISPR motif by: i) determining the GC content of the sequence; and ii) determining whether there are off-target matches of the first 15 nt of the sequence in the genome of the organism; c) selecting the sequence for use in a guide RNA if the GC content of the sequence is 70% or less and no off-target matches are identified. In an embodiment, the sequence is selected if the GC content is 50% or less. In an embodiment, the sequence is selected if the GC content is 40% or less. In an embodiment, the sequence is selected if the GC content is 30% or less. In an embodiment, two or more sequences are analyzed and the sequence having the lowest GC content is selected. In an embodiment, off-target matches are determined in regulatory sequences of the organism. In an embodiment, the gene locus is a regulatory region. An aspect provides a dead guide RNA comprising the targeting sequence selected according to the aforementioned methods.

[0250] In an aspect, the invention provides a dead guide RNA for targeting a functionalized CRISPR system to a gene locus in an organism. In an embodiment of the invention, the dead guide RNA comprises a targeting sequence wherein the CG content of the target sequence is 70% or less, and the first 15 nt of the targeting sequence does not match an off-target sequence downstream from a CRISPR motif in the regulatory sequence of another gene locus in the organism. In certain embodiments, the GC content of the targeting sequence 60% or less, 55% or less, 50% or less, 45% or less, 40% or less, 35% or less or 30% or less. In certain embodiments, the GC content of the targeting sequence is from 70% to 60% or from 60% to 50% or from 50% to 40% or from 40% to 30%. In an embodiment, the targeting sequence has the lowest CG content among potential targeting sequences of the locus.

[0251] In an embodiment of the invention, the first 15 nt of the dead guide match the target sequence. In another embodiment, first 14 nt of the dead guide match the target sequence. In another embodiment, the first 13 nt of the dead guide match the target sequence. In another embodiment first 12 nt of the dead guide match the target sequence. In another embodiment, first 11 nt of the dead guide match the target sequence. In another embodiment, the first 10 nt of the dead guide match the target sequence. In an embodiment of the invention the first 15 nt of the dead guide does not match an off-target sequence downstream from a CRISPR motif in the regulatory region of another gene locus. In other embodiments, the first 14 nt, or the first 13 nt of the dead guide, or the first 12 nt of the guide, or the first 11 nt of the dead guide, or the first 10 nt of the dead guide, does not match an off-target sequence downstream from a CRISPR motif in the regulatory region of another gene locus. In other embodiments, the first 15 nt, or 14 nt, or 13 nt, or 12 nt, or 11 nt of the dead guide do not match an off-target sequence downstream from a CRISPR motif in the genome.

[0252] In certain embodiments, the dead guide RNA includes additional nucleotides at the 3′-end that do not match the target sequence. Thus, a dead guide RNA that includes the first 15 nt, or 14 nt, or 13 nt, or 12 nt, or 11 nt downstream of a CRISPR motif can be extended in length at the 3′ end to 12 nt, 13 nt, 14 nt, 15 nt, 16 nt, 17 nt, 18 nt, 19 nt, 20 nt, or longer.

[0253] The invention provides a method for directing a Cas13 CRISPR-Cas system, including but not limited to a dead Cas13 (dCas13) or functionalized Cas13 system (which may comprise a functionalized Cas13 or functionalized guide) to a gene locus. In an aspect, the invention provides a method for selecting a dead guide RNA targeting sequence and directing a functionalized CRISPR system to a gene locus in an organism. In an aspect, the invention provides a method for selecting a dead guide RNA targeting sequence and effecting gene regulation of a target gene locus by a functionalized Cas13 CRISPR-Cas system. In certain embodiments, the method is used to effect target gene regulation while minimizing off-target effects. In an aspect, the invention provides a method for selecting two or more dead guide RNA targeting sequences and effecting gene regulation of two or more target gene loci by a functionalized Cas13 CRISPR-Cas system. In certain embodiments, the method is used to effect regulation of two or more target gene loci while minimizing off-target effects.

[0254] In an aspect, the invention provides a method of selecting a dead guide RNA targeting sequence for directing a functionalized Cas13 to a gene locus in an organism, which comprises: a) locating one or more CRISPR motifs in the gene locus; b) analyzing the sequence downstream of each CRISPR motif by: i) selecting 10 to 15 nt adjacent to the CRISPR motif, ii) determining the GC content of the sequence; and c) selecting the 10 to 15 nt sequence as a targeting sequence for use in a guide RNA if the GC content of the sequence is 40% or more. In an embodiment, the sequence is selected if the GC content is 50% or more. In an embodiment, the sequence is selected if the GC content is 60% or more. In an embodiment, the sequence is selected if the GC content is 70% or more. In an embodiment, two or more sequences are analyzed and the sequence having the highest GC content is selected. In an embodiment, the method further comprises adding nucleotides to the 3′ end of the selected sequence which do not match the sequence downstream of the CRISPR motif. An aspect provides a dead guide RNA comprising the targeting sequence selected according to the aforementioned methods.

[0255] In an aspect, the invention provides a dead guide RNA for directing a functionalized CRISPR system to a gene locus in an organism wherein the targeting sequence of the dead guide RNA consists of 10 to 15 nucleotides adjacent to the CRISPR motif of the gene locus, wherein the CG content of the target sequence is 50% or more. In certain embodiments, the dead guide RNA further comprises nucleotides added to the 3′ end of the targeting sequence which do not match the sequence downstream of the CRISPR motif of the gene locus.

[0256] In an aspect, the invention provides for a single effector to be directed to one or more, or two or more gene loci. In certain embodiments, the effector is associated with a Cas13, and one or more, or two or more selected dead guide RNAs are used to direct the Cas13-associated effector to one or more, or two or more selected target gene loci. In certain embodiments, the effector is associated with one or more, or two or more selected dead guide RNAs, each selected dead guide RNA, when complexed with a Cas13 enzyme, causing its associated effector to localize to the dead guide RNA target. One non-limiting example of such CRISPR systems modulates activity of one or more, or two or more gene loci subject to regulation by the same transcription factor.

[0257] In an aspect, the invention provides for two or more effectors to be directed to one or more gene loci. In certain embodiments, two or more dead guide RNAs are employed, each of the two or more effectors being associated with a selected dead guide RNA, with each of the two or more effectors being localized to the selected target of its dead guide RNA. One non-limiting example of such CRISPR systems modulates activity of one or more, or two or more gene loci subject to regulation by different transcription factors. Thus, in one non-limiting embodiment, two or more transcription factors are localized to different regulatory sequences of a single gene. In another non-limiting embodiment, two or more transcription factors are localized to different regulatory sequences of different genes. In certain embodiments, one transcription factor is an activator. In certain embodiments, one transcription factor is an inhibitor. In certain embodiments, one transcription factor is an activator and another transcription factor is an inhibitor. In certain embodiments, gene loci expressing different components of the same regulatory pathway are regulated. In certain embodiments, gene loci expressing components of different regulatory pathways are regulated.

[0258] In an aspect, the invention also provides a method and algorithm for designing and selecting dead guide RNAs that are specific for target DNA cleavage or target binding and gene regulation mediated by an active Cas13 CRISPR-Cas system. In certain embodiments, the Cas13 CRISPR-Cas system provides orthogonal gene control using an active Cas13 which cleaves target DNA at one gene locus while at the same time binds to and promotes regulation of another gene locus.

[0259] In an aspect, the invention provides an method of selecting a dead guide RNA targeting sequence for directing a functionalized Cas13 to a gene locus in an organism, without cleavage, which comprises a) locating one or more CRISPR motifs in the gene locus; b) analyzing the sequence downstream of each CRISPR motif by i) selecting 10 to 15 nt adjacent to the CRISPR motif, ii) determining the GC content of the sequence, and c) selecting the 10 to 15 nt sequence as a targeting sequence for use in a dead guide RNA if the GC content of the sequence is 30% more, 40% or more. In certain embodiments, the GC content of the targeting sequence is 35% or more, 40% or more, 45% or more, 50% or more, 55% or more, 60% or more, 65% or more, or 70% or more. In certain embodiments, the GC content of the targeting sequence is from 30% to 40% or from 40% to 50% or from 50% to 60% or from 60% to 70%. In an embodiment of the invention, two or more sequences in a gene locus are analyzed and the sequence having the highest GC content is selected.

[0260] In an embodiment of the invention, the portion of the targeting sequence in which GC content is evaluated is 10 to 15 contiguous nucleotides of the 15 target nucleotides nearest to the PAM. In an embodiment of the invention, the portion of the guide in which GC content is considered is the 10 to 11 nucleotides or 11 to 12 nucleotides or 12 to 13 nucleotides or 13, or 14, or 15 contiguous nucleotides of the 15 nucleotides nearest to the PAM.

[0261] In an aspect, the invention further provides an algorithm for identifying dead guide RNAs which promote CRISPR system gene locus cleavage while avoiding functional activation or inhibition. It is observed that increased GC content in dead guide RNAs of 16 to 20 nucleotides coincides with increased DNA cleavage and reduced functional activation.

[0262] It is also demonstrated herein that efficiency of functionalized Cas13 can be increased by addition of nucleotides to the 3′ end of a guide RNA which do not match a target sequence downstream of the CRISPR motif. For example, of dead guide RNA 11 to 15 nt in length, shorter guides may be less likely to promote target cleavage, but are also less efficient at promoting CRISPR system binding and functional control. In certain embodiments, addition of nucleotides that don't match the target sequence to the 3′ end of the dead guide RNA increase activation efficiency while not increasing undesired target cleavage. In an aspect, the invention also provides a method and algorithm for identifying improved dead guide RNAs that effectively promote CRISPRP system function in DNA binding and gene regulation while not promoting DNA cleavage. Thus, in certain embodiments, the invention provides a dead guide RNA that includes the first 15 nt, or 14 nt, or 13 nt, or 12 nt, or 11 nt downstream of a CRISPR motif and is extended in length at the 3′ end by nucleotides that mismatch the target to 12 nt, 13 nt, 14 nt, 15 nt, 16 nt, 17 nt, 18 nt, 19 nt, 20 nt, or longer.

[0263] In an aspect, the invention provides a method for effecting selective orthogonal gene control. As will be appreciated from the disclosure herein, dead guide selection according to the invention, taking into account guide length and GC content, provides effective and selective transcription control by a functional Cas13 CRISPR-Cas system, for example to regulate transcription of a gene locus by activation or inhibition and minimize off-target effects. Accordingly, by providing effective regulation of individual target loci, the invention also provides effective orthogonal regulation of two or more target loci.

[0264] In certain embodiments, orthogonal gene control is by activation or inhibition of two or more target loci. In certain embodiments, orthogonal gene control is by activation or inhibition of one or more target locus and cleavage of one or more target locus.

[0265] In one aspect, the invention provides a cell comprising a non-naturally occurring Cas13 CRISPR-Cas system comprising one or more dead guide RNAs disclosed or made according to a method or algorithm described herein wherein the expression of one or more gene products has been altered. In an embodiment of the invention, the expression in the cell of two or more gene products has been altered. The invention also provides a cell line from such a cell.

[0266] In one aspect, the invention provides a multicellular organism comprising one or more cells comprising a non-naturally occurring Cas13 CRISPR-Cas system comprising one or more dead guide RNAs disclosed or made according to a method or algorithm described herein. In one aspect, the invention provides a product from a cell, cell line, or multicellular organism comprising a non-naturally occurring Cas13 CRISPR-Cas system comprising one or more dead guide RNAs disclosed or made according to a method or algorithm described herein.

[0267] A further aspect of this invention is the use of gRNA comprising dead guide(s) as described herein, optionally in combination with gRNA comprising guide(s) as described herein or in the state of the art, in combination with systems e.g. cells, transgenic animals, transgenic mice, inducible transgenic animals, inducible transgenic mice) which are engineered for either overexpression of Cas13 or preferably knock in Cas13. As a result a single system (e.g. transgenic animal, cell) can serve as a basis for multiplex gene modifications in systems/network biology. On account of the dead guides, this is now possible in both in vitro, ex vivo, and in vivo.

[0268] For example, once the Cas13 is provided for, one or more dead gRNAs may be provided to direct multiplex gene regulation, and preferably multiplex bidirectional gene regulation. The one or more dead gRNAs may be provided in a spatially and temporally appropriate manner if necessary or desired (for example tissue specific induction of Cas13 expression). On account that the transgenic/inducible Cas13 is provided for (e.g. expressed) in the cell, tissue, animal of interest, both gRNAs comprising dead guides or gRNAs comprising guides are equally effective. In the same manner, a further aspect of this invention is the use of gRNA comprising dead guide(s) as described herein, optionally in combination with gRNA comprising guide(s) as described herein or in the state of the art, in combination with systems (e.g. cells, transgenic animals, transgenic mice, inducible transgenic animals, inducible transgenic mice) which are engineered for knockout Cas13 CRISPR-Cas.

[0269] As a result, the combination of dead guides as described herein with CRISPR applications described herein and CRISPR applications known in the art results in a highly efficient and accurate means for multiplex screening of systems (e.g. network biology). Such screening allows, for example, identification of specific combinations of gene activities for identifying genes responsible for diseases (e.g. on/off combinations), in particular gene related diseases. A preferred application of such screening is cancer. In the same manner, screening for treatment for such diseases is included in the invention. Cells or animals may be exposed to aberrant conditions resulting in disease or disease like effects. Candidate compositions may be provided and screened for an effect in the desired multiplex environment. For example a patient's cancer cells may be screened for which gene combinations will cause them to die, and then use this information to establish appropriate therapies.

[0270] In one aspect, the invention provides a kit comprising one or more of the components described herein. The kit may include dead guides as described herein with or without guides as described herein.

[0271] The structural information provided herein allows for interrogation of dead gRNA interaction with the target DNA and the Cas13 permitting engineering or alteration of dead gRNA structure to optimize functionality of the entire Cas13 CRISPR-Cas system. For example, loops of the dead gRNA may be extended, without colliding with the Cas13 protein by the insertion of adaptor proteins that can bind to RNA. These adaptor proteins can further recruit effector proteins or fusions which comprise one or more functional domains.

[0272] In some preferred embodiments, the functional domain is a transcriptional activation domain, preferably VP64. In some embodiments, the functional domain is a transcription repression domain, preferably KRAB. In some embodiments, the transcription repression domain is SID, or concatemers of SID (e.g. SID4X). In some embodiments, the functional domain is an epigenetic modifying domain, such that an epigenetic modifying enzyme is provided. In some embodiments, the functional domain is an activation domain, which may be the P65 activation domain.

[0273] An aspect of the invention is that the above elements are comprised in a single composition or comprised in individual compositions. These compositions may advantageously be applied to a host to elicit a functional effect on the genomic level.

[0274] In general, the dead gRNA is modified in a manner that provides specific binding sites (e.g. aptamers) for adapter proteins comprising one or more functional domains (e.g. via fusion protein) to bind to. The modified dead gRNA is modified such that once the dead gRNA forms a CRISPR complex (i.e. Cas13 binding to dead gRNA and target) the adapter proteins bind and, the functional domain on the adapter protein is positioned in a spatial orientation which is advantageous for the attributed function to be effective. For example, if the functional domain is a transcription activator (e.g. VP64 or p65), the transcription activator is placed in a spatial orientation which allows it to affect the transcription of the target. Likewise, a transcription repressor will be advantageously positioned to affect the transcription of the target and a nuclease (e.g. Fok1) will be advantageously positioned to cleave or partially cleave the target.

[0275] The skilled person will understand that modifications to the dead gRNA which allow for binding of the adapter+functional domain but not proper positioning of the adapter+ functional domain (e.g. due to steric hindrance within the three dimensional structure of the CRISPR complex) are modifications which are not intended. The one or more modified dead gRNA may be modified at the tetra loop, the stem loop 1, stem loop 2, or stem loop 3, as described herein, preferably at either the tetra loop or stem loop 2, and most preferably at both the tetra loop and stem loop 2.

[0276] As explained herein the functional domains may be, for example, one or more domains from the group consisting of methylase activity, demethylase activity, transcription activation activity, transcription repression activity, transcription release factor activity, histone modification activity, RNA cleavage activity, DNA cleavage activity, nucleic acid binding activity, and molecular switches (e.g. light inducible). In some cases it is advantageous that additionally at least one NLS is provided. In some instances, it is advantageous to position the NLS at the N terminus. When more than one functional domain is included, the functional domains may be the same or different.

[0277] The dead gRNA may be designed to include multiple binding recognition sites (e.g. aptamers) specific to the same or different adapter protein. The dead gRNA may be designed to bind to the promoter region −1000-+1 nucleic acids upstream of the transcription start site (i.e. TSS), preferably −200 nucleic acids. This positioning improves functional domains which affect gene activation (e.g. transcription activators) or gene inhibition (e.g. transcription repressors). The modified dead gRNA may be one or more modified dead gRNAs targeted to one or more target loci (e.g. at least 1 gRNA, at least 2 gRNA, at least 5 gRNA, at least 10 gRNA, at least 20 gRNA, at least 30 gRNA, at least 50 gRNA) comprised in a composition.

[0278] The adaptor protein may be any number of proteins that binds to an aptamer or recognition site introduced into the modified dead gRNA and which allows proper positioning of one or more functional domains, once the dead gRNA has been incorporated into the CRISPR complex, to affect the target with the attributed function. As explained in detail in this application such may be coat proteins, preferably bacteriophage coat proteins. The functional domains associated with such adaptor proteins (e.g. in the form of fusion protein) may include, for example, one or more domains from the group consisting of methylase activity, demethylase activity, transcription activation activity, transcription repression activity, transcription release factor activity, histone modification activity, RNA cleavage activity, DNA cleavage activity, nucleic acid binding activity, and molecular switches (e.g. light inducible). Preferred domains are Fok1, VP64, P65, HSF1, MyoD1. In the event that the functional domain is a transcription activator or transcription repressor it is advantageous that additionally at least an NLS is provided and preferably at the N terminus. When more than one functional domain is included, the functional domains may be the same or different. The adaptor protein may utilize known linkers to attach such functional domains.

[0279] Thus, the modified dead gRNA, the (inactivated) Cas13 (with or without functional domains), and the binding protein with one or more functional domains, may each individually be comprised in a composition and administered to a host individually or collectively. Alternatively, these components may be provided in a single composition for administration to a host. Administration to a host may be performed via viral vectors known to the skilled person or described herein for delivery to a host (e.g. lentiviral vector, adenoviral vector, AAV vector). As explained herein, use of different selection markers (e.g. for lentiviral gRNA selection) and concentration of gRNA (e.g. dependent on whether multiple gRNAs are used) may be advantageous for eliciting an improved effect.

[0280] On the basis of this concept, several variations are appropriate to elicit a genomic locus event, including DNA cleavage, gene activation, or gene deactivation. Using the provided compositions, the person skilled in the art can advantageously and specifically target single or multiple loci with the same or different functional domains to elicit one or more genomic locus events. The compositions may be applied in a wide variety of methods for screening in libraries in cells and functional modeling in vivo (e.g. gene activation of lincRNA and identification of function; gain-of-function modeling; loss-of-function modeling; the use the compositions of the invention to establish cell lines and transgenic animals for optimization and screening purposes).

[0281] The current invention comprehends the use of the compositions of the current invention to establish and utilize conditional or inducible CRISPR transgenic cell/animals, which are not believed prior to the present invention or application. For example, the target cell comprises Cas13 conditionally or inducibly (e.g. in the form of Cre dependent constructs) and/or the adapter protein conditionally or inducibly and, on expression of a vector introduced into the target cell, the vector expresses that which induces or gives rise to the condition of Cas13 expression and/or adaptor expression in the target cell. By applying the teaching and compositions of the current invention with the known method of creating a CRISPR complex, inducible genomic events affected by functional domains are also an aspect of the current invention. One example of this is the creation of a CRISPR knock-in/conditional transgenic animal (e.g. mouse comprising e.g. a Lox-Stop-polyA-Lox (LSL) cassette) and subsequent delivery of one or more compositions providing one or more modified dead gRNA (e.g. −200 nucleotides to TSS of a target gene of interest for gene activation purposes) as described herein (e.g. modified dead gRNA with one or more aptamers recognized by coat proteins, e.g. MS2), one or more adapter proteins as described herein (MS2 binding protein linked to one or more VP64) and means for inducing the conditional animal (e.g. Cre recombinase for rendering Cas13 expression inducible). Alternatively, the adaptor protein may be provided as a conditional or inducible element with a conditional or inducible Cas13 to provide an effective model for screening purposes, which advantageously only requires minimal design and administration of specific dead gRNAs for a broad number of applications.

[0282] In another aspect the dead guides are further modified to improve specificity. Protected dead guides may be synthesized, whereby secondary structure is introduced into the 3′ end of the dead guide to improve its specificity. A protected guide RNA (pgRNA) comprises a guide sequence capable of hybridizing to a target sequence in a genomic locus of interest in a cell and a protector strand, wherein the protector strand is optionally complementary to the guide sequence and wherein the guide sequence may in part be hybridizable to the protector strand. The pgRNA optionally includes an extension sequence. The thermodynamics of the pgRNA-target DNA hybridization is determined by the number of bases complementary between the guide RNA and target DNA. By employing ‘thermodynamic protection’, specificity of dead gRNA can be improved by adding a protector sequence. For example, one method adds a complementary protector strand of varying lengths to the 3′ end of the guide sequence within the dead gRNA. As a result, the protector strand is bound to at least a portion of the dead gRNA and provides for a protected gRNA (pgRNA). In turn, the dead gRNA references herein may be easily protected using the described embodiments, resulting in pgRNA. The protector strand can be either a separate RNA transcript or strand or a chimeric version joined to the 3′ end of the dead gRNA guide sequence.

### Tandem Guides and Uses in a Multiplex (Tandem) Targeting Approach

[0283] The inventors have shown that CRISPR enzymes as defined herein can employ more than one RNA guide without losing activity. This enables the use of the CRISPR enzymes, systems or complexes as defined herein for targeting multiple DNA targets, genes or gene loci, with a single enzyme, system or complex as defined herein. The guide RNAs may be tandemly arranged, optionally separated by a nucleotide sequence such as a direct repeat as defined herein. The position of the different guide RNAs is the tandem does not influence the activity. It is noted that the terms “CRISPR-Cas system”, “CRISP-Cas complex” “CRISPR complex” and “CRISPR system” are used interchangeably. Also the terms “CRISPR enzyme”, “Cas enzyme”, or “CRISPR-Cas enzyme”, can be used interchangeably. In preferred embodiments, said CRISPR enzyme, CRISP-Cas enzyme or Cas enzyme is Cas13, or any one of the modified or mutated variants thereof described herein elsewhere.

[0284] In one aspect, the invention provides a non-naturally occurring or engineered CRISPR enzyme, preferably a class 2 CRISPR enzyme, preferably a Type V or VI CRISPR enzyme as described herein, such as without limitation Cas13 as described herein elsewhere, used for tandem or multiplex targeting. It is to be understood that any of the CRISPR (or CRISPR-Cas or Cas) enzymes, complexes, or systems according to the invention as described herein elsewhere may be used in such an approach. Any of the methods, products, compositions and uses as described herein elsewhere are equally applicable with the multiplex or tandem targeting approach further detailed below. By means of further guidance, the following particular aspects and embodiments are provided.

[0285] In one aspect, the invention provides for the use of a Cas13 enzyme, complex or system as defined herein for targeting multiple gene loci. In one embodiment, this can be established by using multiple (tandem or multiplex) guide RNA (gRNA) sequences.

[0286] In one aspect, the invention provides methods for using one or more elements of a Cas13 enzyme, complex or system as defined herein for tandem or multiplex targeting, wherein said CRISP system comprises multiple guide RNA sequences. Preferably, said gRNA sequences are separated by a nucleotide sequence, such as a direct repeat as defined herein elsewhere.

[0287] The Cas13 enzyme, system or complex as defined herein provides an effective means for modifying multiple target polynucleotides. The Cas13 enzyme, system or complex as defined herein has a wide variety of utility including modifying (e.g., deleting, inserting, translocating, inactivating, activating) one or more target polynucleotides in a multiplicity of cell types. As such the Cas13 enzyme, system or complex as defined herein of the invention has a broad spectrum of applications in, e.g., gene therapy, drug screening, disease diagnosis, and prognosis, including targeting multiple gene loci within a single CRISPR system.

[0288] In one aspect, the invention provides a Cas13 enzyme, system or complex as defined herein, i.e. a Cas13 CRISPR-Cas complex having a Cas13 protein having at least one destabilization domain associated therewith, and multiple guide RNAs that target multiple nucleic acid molecules such as DNA molecules, whereby each of said multiple guide RNAs specifically targets its corresponding nucleic acid molecule, e.g., DNA molecule. Each nucleic acid molecule target, e.g., DNA molecule can encode a gene product or encompass a gene locus. Using multiple guide RNAs hence enables the targeting of multiple gene loci or multiple genes. In some embodiments the Cas13 enzyme may cleave the RNA molecule encoding the gene product. In some embodiments expression of the gene product is altered. The Cas13 protein and the guide RNAs do not naturally occur together. The invention comprehends the guide RNAs comprising tandemly arranged guide sequences. The invention further comprehends coding sequences for the Cas13 protein being codon optimized for expression in a eukaryotic cell. In a preferred embodiment the eukaryotic cell is a mammalian cell, a plant cell or a yeast cell and in a more preferred embodiment the mammalian cell is a human cell. Expression of the gene product may be decreased. The Cas13 enzyme may form part of a CRISPR system or complex, which further comprises tandemly arranged guide RNAs (gRNAs) comprising a series of 2, 3, 4, 5, 6, 7, 8, 9, 10, 15, 25, 25, 30, or more than 30 guide sequences, each capable of specifically hybridizing to a target sequence in a genomic locus of interest in a cell. In some embodiments, the functional Cas13 CRISPR system or complex binds to the multiple target sequences. In some embodiments, the functional CRISPR system or complex may edit the multiple target sequences, e.g., the target sequences may comprise a genomic locus, and in some embodiments there may be an alteration of gene expression. In some embodiments, the functional CRISPR system or complex may comprise further functional domains. In some embodiments, the invention provides a method for altering or modifying expression of multiple gene products. The method may comprise introducing into a cell containing said target nucleic acids, e.g., DNA molecules, or containing and expressing target nucleic acid, e.g., DNA molecules; for instance, the target nucleic acids may encode gene products or provide for expression of gene products (e.g., regulatory sequences).

[0289] In preferred embodiments the CRISPR enzyme used for multiplex targeting is Cas13, or the CRISPR system or complex comprises Cas13. In some embodiments, the CRISPR enzyme used for multiplex targeting is AsCas13, or the CRISPR system or complex used for multiplex targeting comprises an AsCas13. In some embodiments, the CRISPR enzyme is an LbCas13, or the CRISPR system or complex comprises LbCas13. In some embodiments, the Cas enzyme used for multiplex targeting cleaves both strands of DNA to produce a double strand break (DSB). In some embodiments, the CRISPR enzyme used for multiplex targeting is a nickase. In some embodiments, the Cas13 enzyme used for multiplex targeting is a dual nickase. In some embodiments, the Cas13 enzyme used for multiplex targeting is a Cas13 enzyme such as a DD Cas13 enzyme as defined herein elsewhere.

[0290] In some general embodiments, the Cas13 enzyme used for multiplex targeting is associated with one or more functional domains. In some more specific embodiments, the CRISPR enzyme used for multiplex targeting is a deadCas13 as defined herein elsewhere.

[0291] In an aspect, the present invention provides a means for delivering the Cas13 enzyme, system or complex for use in multiple targeting as defined herein or the polynucleotides defined herein. Non-limiting examples of such delivery means are e.g. particle(s) delivering component(s) of the complex, vector(s) comprising the polynucleotide(s) discussed herein (e.g., encoding the CRISPR enzyme, providing the nucleotides encoding the CRISPR complex). In some embodiments, the vector may be a plasmid or a viral vector such as AAV, or lentivirus. Transient transfection with plasmids, e.g., into HEK cells may be advantageous, especially given the size limitations of AAV and that while Cas13 fits into AAV, one may reach an upper limit with additional guide RNAs.

[0292] Also provided is a model that constitutively expresses the Cas13 enzyme, complex or system as used herein for use in multiplex targeting. The organism may be transgenic and may have been transfected with the present vectors or may be the offspring of an organism so transfected. In a further aspect, the present invention provides compositions comprising the CRISPR enzyme, system and complex as defined herein or the polynucleotides or vectors described herein. Also provides are Cas13 CRISPR systems or complexes comprising multiple guide RNAs, preferably in a tandemly arranged format. Said different guide RNAs may be separated by nucleotide sequences such as direct repeats.

[0293] Also provided is a method of treating a subject, e.g., a subject in need thereof, comprising inducing gene editing by transforming the subject with the polynucleotide encoding the Cas13 CRISPR system or complex or any of polynucleotides or vectors described herein and administering them to the subject. A suitable repair template may also be provided, for example delivered by a vector comprising said repair template. Also provided is a method of treating a subject, e.g., a subject in need thereof, comprising inducing transcriptional activation or repression of multiple target gene loci by transforming the subject with the polynucleotides or vectors described herein, wherein said polynucleotide or vector encodes or comprises the Cas13 enzyme, complex or system comprising multiple guide RNAs, preferably tandemly arranged. Where any treatment is occurring ex vivo, for example in a cell culture, then it will be appreciated that the term ‘subject’ may be replaced by the phrase “cell or cell culture.”

[0294] Compositions comprising Cas13 enzyme, complex or system comprising multiple guide RNAs, preferably tandemly arranged, or the polynucleotide or vector encoding or comprising said Cas13 enzyme, complex or system comprising multiple guide RNAs, preferably tandemly arranged, for use in the methods of treatment as defined herein elsewhere are also provided. A kit of parts may be provided including such compositions. Use of said composition in the manufacture of a medicament for such methods of treatment are also provided. Use of a Cas13 CRISPR system in screening is also provided by the present invention, e.g., gain of function screens. Cells which are artificially forced to overexpress a gene are be able to down regulate the gene over time (re-establishing equilibrium) e.g. by negative feedback loops. By the time the screen starts the unregulated gene might be reduced again. Using an inducible Cas13 activator allows one to induce transcription right before the screen and therefore minimizes the chance of false negative hits. Accordingly, by use of the instant invention in screening, e.g., gain of function screens, the chance of false negative results may be minimized.

[0295] In one aspect, the invention provides an engineered, non-naturally occurring CRISPR system comprising a Cas13 protein and multiple guide RNAs that each specifically target a DNA molecule encoding a gene product in a cell, whereby the multiple guide RNAs each target their specific DNA molecule encoding the gene product and the Cas13 protein cleaves the target DNA molecule encoding the gene product, whereby expression of the gene product is altered; and, wherein the CRISPR protein and the guide RNAs do not naturally occur together. The invention comprehends the multiple guide RNAs comprising multiple guide sequences, preferably separated by a nucleotide sequence such as a direct repeat and optionally fused to a tracr sequence. In an embodiment of the invention the CRISPR protein is a type V or VI CRISPR-Cas protein and in a more preferred embodiment the CRISPR protein is a Cas13 protein. The invention further comprehends a Cas13 protein being codon optimized for expression in a eukaryotic cell. In a preferred embodiment the eukaryotic cell is a mammalian cell and in a more preferred embodiment the mammalian cell is a human cell. In a further embodiment of the invention, the expression of the gene product is decreased.

[0296] In another aspect, the invention provides an engineered, non-naturally occurring vector system comprising one or more vectors comprising a first regulatory element operably linked to the multiple Cas13 CRISPR system guide RNAs that each specifically target a DNA molecule encoding a gene product and a second regulatory element operably linked coding for a CRISPR protein. Both regulatory elements may be located on the same vector or on different vectors of the system. The multiple guide RNAs target the multiple DNA molecules encoding the multiple gene products in a cell and the CRISPR protein may cleave the multiple DNA molecules encoding the gene products (it may cleave one or both strands or have substantially no nuclease activity), whereby expression of the multiple gene products is altered; and, wherein the CRISPR protein and the multiple guide RNAs do not naturally occur together. In a preferred embodiment the CRISPR protein is Cas13 protein, optionally codon optimized for expression in a eukaryotic cell. In a preferred embodiment the eukaryotic cell is a mammalian cell, a plant cell or a yeast cell and in a more preferred embodiment the mammalian cell is a human cell. In a further embodiment of the invention, the expression of each of the multiple gene products is altered, preferably decreased.

[0297] In one aspect, the invention provides a vector system comprising one or more vectors. In some embodiments, the system comprises: (a) a first regulatory element operably linked to a direct repeat sequence and one or more insertion sites for inserting one or more guide sequences up- or downstream (whichever applicable) of the direct repeat sequence, wherein when expressed, the one or more guide sequence(s) direct(s) sequence-specific binding of the CRISPR complex to the one or more target sequence(s) in a eukaryotic cell, wherein the CRISPR complex comprises a Cas13 enzyme complexed with the one or more guide sequence(s) that is hybridized to the one or more target sequence(s); and (b) a second regulatory element operably linked to an enzyme-coding sequence encoding said Cas13 enzyme, preferably comprising at least one nuclear localization sequence and/or at least one NES; wherein components (a) and (b) are located on the same or different vectors of the system. Where applicable, a tracr sequence may also be provided. In some embodiments, component (a) further comprises two or more guide sequences operably linked to the first regulatory element, wherein when expressed, each of the two or more guide sequences direct sequence specific binding of a Cas13 CRISPR complex to a different target sequence in a eukaryotic cell. In some embodiments, the CRISPR complex comprises one or more nuclear localization sequences and/or one or more NES of sufficient strength to drive accumulation of said Cas13 CRISPR complex in a detectable amount in or out of the nucleus of a eukaryotic cell. In some embodiments, the first regulatory element is a polymerase III promoter. In some embodiments, the second regulatory element is a polymerase II promoter. In some embodiments, each of the guide sequences is at least 16, 17, 18, 19, 20, 25 nucleotides, or between 16-30, or between 16-25, or between 16-20 nucleotides in length.

[0298] Recombinant expression vectors can comprise the polynucleotides encoding the Cas13 enzyme, system or complex for use in multiple targeting as defined herein in a form suitable for expression of the nucleic acid in a host cell, which means that the recombinant expression vectors include one or more regulatory elements, which may be selected on the basis of the host cells to be used for expression, that is operatively-linked to the nucleic acid sequence to be expressed. Within a recombinant expression vector, “operably linked” is intended to mean that the nucleotide sequence of interest is linked to the regulatory element(s) in a manner that allows for expression of the nucleotide sequence (e.g., in an in vitro transcription/translation system or in a host cell when the vector is introduced into the host cell).

[0299] In some embodiments, a host cell is transiently or non-transiently transfected with one or more vectors comprising the polynucleotides encoding the Cas13 enzyme, system or complex for use in multiple targeting as defined herein. In some embodiments, a cell is transfected as it naturally occurs in a subject. In some embodiments, a cell that is transfected is taken from a subject. In some embodiments, the cell is derived from cells taken from a subject, such as a cell line. A wide variety of cell lines for tissue culture are known in the art and exemplified herein elsewhere. Cell lines are available from a variety of sources known to those with skill in the art (see, e.g., the American Type Culture Collection (ATCC) (Manassas, Va.)). In some embodiments, a cell transfected with one or more vectors comprising the polynucleotides encoding the Cas13 enzyme, system or complex for use in multiple targeting as defined herein is used to establish a new cell line comprising one or more vector-derived sequences. In some embodiments, a cell transiently transfected with the components of a Cas13 CRISPR system or complex for use in multiple targeting as described herein (such as by transient transfection of one or more vectors, or transfection with RNA), and modified through the activity of a Cas13 CRISPR system or complex, is used to establish a new cell line comprising cells containing the modification but lacking any other exogenous sequence. In some embodiments, cells transiently or non-transiently transfected with one or more vectors comprising the polynucleotides encoding the Cas13 enzyme, system or complex for use in multiple targeting as defined herein, or cell lines derived from such cells are used in assessing one or more test compounds.

[0300] The term “regulatory element” is as defined herein elsewhere.

[0301] Advantageous vectors include lentiviruses and adeno-associated viruses, and types of such vectors can also be selected for targeting particular types of cells.

[0302] In one aspect, the invention provides a eukaryotic host cell comprising (a) a first regulatory element operably linked to a direct repeat sequence and one or more insertion sites for inserting one or more guide RNA sequences up- or downstream (whichever applicable) of the direct repeat sequence, wherein when expressed, the guide sequence(s) direct(s) sequence-specific binding of the Cas13 CRISPR complex to the respective target sequence(s) in a eukaryotic cell, wherein the Cas13 CRISPR complex comprises a Cas13 enzyme complexed with the one or more guide sequence(s) that is hybridized to the respective target sequence(s); and/or (b) a second regulatory element operably linked to an enzyme-coding sequence encoding said Cas13 enzyme comprising preferably at least one nuclear localization sequence and/or NES. In some embodiments, the host cell comprises components (a) and (b). Where applicable, a tracr sequence may also be provided. In some embodiments, component (a), component (b), or components (a) and (b) are stably integrated into a genome of the host eukaryotic cell. In some embodiments, component (a) further comprises two or more guide sequences operably linked to the first regulatory element, and optionally separated by a direct repeat, wherein when expressed, each of the two or more guide sequences direct sequence specific binding of a Cas13 CRISPR complex to a different target sequence in a eukaryotic cell. In some embodiments, the Cas13 enzyme comprises one or more nuclear localization sequences and/or nuclear export sequences or NES of sufficient strength to drive accumulation of said CRISPR enzyme in a detectable amount in and/or out of the nucleus of a eukaryotic cell.

[0303] In some embodiments, the Cas13 enzyme is a type V or VI CRISPR system enzyme. In some embodiments, the Cas enzyme is a Cas13 enzyme. In some embodiments, the Cas13 enzyme is derived from Francisella tularensis 1, Francisella tularensis subsp. novicida, Prevotella albensis, Lachnospiraceae bacterium MC2017 1, Butyrivibrio proteoclasticus, Peregrinibacteria bacterium GW2011_GWA2_33_10, Parcubacteria bacterium GW2011_GWC2_44_17, Smithella sp. SCADC, Acidaminococcus sp. BV3L6, Lachnospiraceae bacterium MA2020, Candidatus Methanoplasma termitum, Eubacterium eligens, Moraxella bovoculi 237, Leptospira inadai, Lachnospiraceae bacterium ND2006, Porphyromonas crevioricanis 3, Prevotella disiens, or Porphyromonas macacae Cas13, and may include further alterations or mutations of the Cas13 as defined herein elsewhere, and can be a chimeric Cas13. In some embodiments, the Cas13 enzyme is codon-optimized for expression in a eukaryotic cell. In some embodiments, the CRISPR enzyme directs cleavage of one or two strands at the location of the target sequence. In some embodiments, the first regulatory element is a polymerase III promoter. In some embodiments, the second regulatory element is a polymerase II promoter. In some embodiments, the one or more guide sequence(s) is (are each) at least 16, 17, 18, 19, 20, 25 nucleotides, or between 16-30, or between 16-25, or between 16-20 nucleotides in length. When multiple guide RNAs are used, they are preferably separated by a direct repeat sequence. In an aspect, the invention provides a non-human eukaryotic organism; preferably a multicellular eukaryotic organism, comprising a eukaryotic host cell according to any of the described embodiments. In other aspects, the invention provides a eukaryotic organism; preferably a multicellular eukaryotic organism, comprising a eukaryotic host cell according to any of the described embodiments. The organism in some embodiments of these aspects may be an animal; for example a mammal. Also, the organism may be an arthropod such as an insect. The organism also may be a plant. Further, the organism may be a fungus.

[0304] In one aspect, the invention provides a kit comprising one or more of the components described herein. In some embodiments, the kit comprises a vector system and instructions for using the kit. In some embodiments, the vector system comprises (a) a first regulatory element operably linked to a direct repeat sequence and one or more insertion sites for inserting one or more guide sequences up- or downstream (whichever applicable) of the direct repeat sequence, wherein when expressed, the guide sequence directs sequence-specific binding of a Cas13 CRISPR complex to a target sequence in a eukaryotic cell, wherein the Cas13 CRISPR complex comprises a Cas13 enzyme complexed with the guide sequence that is hybridized to the target sequence; and/or (b) a second regulatory element operably linked to an enzyme-coding sequence encoding said Cas13 enzyme comprising a nuclear localization sequence. Where applicable, a tracr sequence may also be provided. In some embodiments, the kit comprises components (a) and (b) located on the same or different vectors of the system. In some embodiments, component (a) further comprises two or more guide sequences operably linked to the first regulatory element, wherein when expressed, each of the two or more guide sequences direct sequence specific binding of a CRISPR complex to a different target sequence in a eukaryotic cell. In some embodiments, the Cas13 enzyme comprises one or more nuclear localization sequences of sufficient strength to drive accumulation of said CRISPR enzyme in a detectable amount in the nucleus of a eukaryotic cell. In some embodiments, the CRISPR enzyme is a type V or VI CRISPR system enzyme. In some embodiments, the CRISPR enzyme is a Cas13 enzyme. In some embodiments, the Cas13 enzyme is derived from Francisella tularensis 1, Francisella tularensis subsp. novicida, Prevotella albensis, Lachnospiraceae bacterium MC2017 1, Butyrivibrio proteoclasticus, Peregrinibacteria bacterium GW2011_GWA2_33_10, Parcubacteria bacterium GW2011_GWC2_44_17, Smithella sp. SCADC, Acidaminococcus sp. BV3L6, Lachnospiraceae bacterium MA2020, Candidatus Methanoplasma termitum, Eubacterium eligens, Moraxella bovoculi 237, Leptospira inadai, Lachnospiraceae bacterium ND2006, Porphyromonas crevioricanis 3, Prevotella disiens, or Porphyromonas macacae Cas13 (e.g., modified to have or be associated with at least one DD), and may include further alteration or mutation of the Cas13, and can be a chimeric Cas13. In some embodiments, the DD-CRISPR enzyme is codon-optimized for expression in a eukaryotic cell. In some embodiments, the DD-CRISPR enzyme directs cleavage of one or two strands at the location of the target sequence. In some embodiments, the DD-CRISPR enzyme lacks or substantially DNA strand cleavage activity (e.g., no more than 5% nuclease activity as compared with a wild type enzyme or enzyme not having the mutation or alteration that decreases nuclease activity). In some embodiments, the first regulatory element is a polymerase III promoter. In some embodiments, the second regulatory element is a polymerase II promoter. In some embodiments, the guide sequence is at least 16, 17, 18, 19, 20, 25 nucleotides, or between 16-30, or between 16-25, or between 16-20 nucleotides in length.

[0305] In one aspect, the invention provides a method of modifying multiple target polynucleotides in a host cell such as a eukaryotic cell. In some embodiments, the method comprises allowing a Cas13 CRISPR complex to bind to multiple target polynucleotides, e.g., to effect cleavage of said multiple target polynucleotides, thereby modifying multiple target polynucleotides, wherein the Cas13 CRISPR complex comprises a Cas13 enzyme complexed with multiple guide sequences each of the being hybridized to a specific target sequence within said target polynucleotide, wherein said multiple guide sequences are linked to a direct repeat sequence. Where applicable, a tracr sequence may also be provided (e.g. to provide a single guide RNA, sgRNA). In some embodiments, said cleavage comprises cleaving one or two strands at the location of each of the target sequence by said Cas13 enzyme. In some embodiments, said cleavage results in decreased transcription of the multiple target genes. In some embodiments, the method further comprises repairing one or more of said cleaved target polynucleotide by homologous recombination with an exogenous template polynucleotide, wherein said repair results in a mutation comprising an insertion, deletion, or substitution of one or more nucleotides of one or more of said target polynucleotides. In some embodiments, said mutation results in one or more amino acid changes in a protein expressed from a gene comprising one or more of the target sequence(s). In some embodiments, the method further comprises delivering one or more vectors to said eukaryotic cell, wherein the one or more vectors drive expression of one or more of: the Cas13 enzyme and the multiple guide RNA sequence linked to a direct repeat sequence. Where applicable, a tracr sequence may also be provided. In some embodiments, said vectors are delivered to the eukaryotic cell in a subject. In some embodiments, said modifying takes place in said eukaryotic cell in a cell culture. In some embodiments, the method further comprises isolating said eukaryotic cell from a subject prior to said modifying. In some embodiments, the method further comprises returning said eukaryotic cell and/or cells derived therefrom to said subject.

[0306] In one aspect, the invention provides a method of modifying expression of multiple polynucleotides in a eukaryotic cell. In some embodiments, the method comprises allowing a Cas13 CRISPR complex to bind to multiple polynucleotides such that said binding results in increased or decreased expression of said polynucleotides; wherein the Cas13 CRISPR complex comprises a Cas13 enzyme complexed with multiple guide sequences each specifically hybridized to its own target sequence within said polynucleotide, wherein said guide sequences are linked to a direct repeat sequence. Where applicable, a tracr sequence may also be provided. In some embodiments, the method further comprises delivering one or more vectors to said eukaryotic cells, wherein the one or more vectors drive expression of one or more of: the Cas13 enzyme and the multiple guide sequences linked to the direct repeat sequences. Where applicable, a tracr sequence may also be provided.

[0307] In one aspect, the invention provides a recombinant polynucleotide comprising multiple guide RNA sequences up- or downstream (whichever applicable) of a direct repeat sequence, wherein each of the guide sequences when expressed directs sequence-specific binding of a Cas13 CRISPR complex to its corresponding target sequence present in a eukaryotic cell. In some embodiments, the target sequence is a viral sequence present in a eukaryotic cell. Where applicable, a tracr sequence may also be provided. In some embodiments, the target sequence is a proto-oncogene or an oncogene.

[0308] Aspects of the invention encompass a non-naturally occurring or engineered composition that may comprise a guide RNA (gRNA) comprising a guide sequence capable of hybridizing to a target sequence in a genomic locus of interest in a cell and a Cas13 enzyme as defined herein that may comprise at least one or more nuclear localization sequences.

[0309] An aspect of the invention encompasses methods of modifying a genomic locus of interest to change gene expression in a cell by introducing into the cell any of the compositions described herein.

[0310] An aspect of the invention is that the above elements are comprised in a single composition or comprised in individual compositions. These compositions may advantageously be applied to a host to elicit a functional effect on the genomic level.

[0311] As used herein, the term “guide RNA” or “gRNA” has the leaning as used herein elsewhere and comprises any polynucleotide sequence having sufficient complementarity with a target nucleic acid sequence to hybridize with the target nucleic acid sequence and direct sequence-specific binding of a nucleic acid-targeting complex to the target nucleic acid sequence. Each gRNA may be designed to include multiple binding recognition sites (e.g., aptamers) specific to the same or different adapter protein. Each gRNA may be designed to bind to the promoter region −1000-+1 nucleic acids upstream of the transcription start site (i.e. TSS), preferably −200 nucleic acids. This positioning improves functional domains which affect gene activation (e.g., transcription activators) or gene inhibition (e.g., transcription repressors). The modified gRNA may be one or more modified gRNAs targeted to one or more target loci (e.g., at least 1 gRNA, at least 2 gRNA, at least 5 gRNA, at least 10 gRNA, at least 20 gRNA, at least 30 g RNA, at least 50 gRNA) comprised in a composition. Said multiple gRNA sequences can be tandemly arranged and are preferably separated by a direct repeat.

[0312] Thus, gRNA, the CRISPR enzyme as defined herein may each individually be comprised in a composition and administered to a host individually or collectively. Alternatively, these components may be provided in a single composition for administration to a host. Administration to a host may be performed via viral vectors known to the skilled person or described herein for delivery to a host (e.g., lentiviral vector, adenoviral vector, AAV vector). As explained herein, use of different selection markers (e.g., for lentiviral sgRNA selection) and concentration of gRNA (e.g., dependent on whether multiple gRNAs are used) may be advantageous for eliciting an improved effect. On the basis of this concept, several variations are appropriate to elicit a genomic locus event, including DNA cleavage, gene activation, or gene deactivation. Using the provided compositions, the person skilled in the art can advantageously and specifically target single or multiple loci with the same or different functional domains to elicit one or more genomic locus events. The compositions may be applied in a wide variety of methods for screening in libraries in cells and functional modeling in vivo (e.g., gene activation of lincRNA and identification of function; gain-of-function modeling; loss-of-function modeling; the use the compositions of the invention to establish cell lines and transgenic animals for optimization and screening purposes).

[0313] The current invention comprehends the use of the compositions of the current invention to establish and utilize conditional or inducible CRISPR transgenic cell/animals; see, e.g., Platt et al., Cell (2014), 159(2): 440-455, or PCT patent publications cited herein, such as WO 2014/093622 (PCT/US2013/074667). For example, cells or animals such as non-human animals, e.g., vertebrates or mammals, such as rodents, e.g., mice, rats, or other laboratory or field animals, e.g., cats, dogs, sheep, etc., may be ‘knock-in’ whereby the animal conditionally or inducibly expresses Cas13 akin to Platt et al. The target cell or animal thus comprises the CRISPR enzyme (e.g., Cas13) conditionally or inducibly (e.g., in the form of Cre dependent constructs), on expression of a vector introduced into the target cell, the vector expresses that which induces or gives rise to the condition of the CRISPR enzyme (e.g., Cas13) expression in the target cell. By applying the teaching and compositions as defined herein with the known method of creating a CRISPR complex, inducible genomic events are also an aspect of the current invention. Examples of such inducible events have been described herein elsewhere.

[0314] In some embodiments, phenotypic alteration is preferably the result of genome modification when a genetic disease is targeted, especially in methods of therapy and preferably where a repair template is provided to correct or alter the phenotype.

[0315] In some embodiments diseases that may be targeted include those concerned with disease-causing splice defects.

[0316] In some embodiments, cellular targets include Hemopoietic Stem/Progenitor Cells (CD34+); Human T cells; and Eye (retinal cells)—for example photoreceptor precursor cells.

[0317] In some embodiments Gene targets include: Human Beta Globin—HBB (for treating Sickle Cell Anemia, including by stimulating gene-conversion (using closely related HBD gene as an endogenous template)); CD3 (T-Cells); and CEP920-retina (eye).

[0318] In some embodiments disease targets also include: cancer; Sickle Cell Anemia (based on a point mutation); HBV, HIV; Beta-Thalassemia; and ophthalmic or ocular disease—for example Leber Congenital Amaurosis (LCA)-causing Splice Defect.

[0319] In some embodiments delivery methods include: Cationic Lipid Mediated “direct” delivery of Enzyme-Guide complex (RiboNucleoProtein) and electroporation of plasmid DNA.

[0320] Methods, products and uses described herein may be used for non-therapeutic purposes. Furthermore, any of the methods described herein may be applied in vitro and ex vivo.

[0321] In an aspect, provided is a non-naturally occurring or engineered composition comprising:

I. two or more CRISPR-Cas system polynucleotide sequences comprising

[0322] (a) a first guide sequence capable of hybridizing to a first target sequence in a polynucleotide locus,

[0323] (b) a second guide sequence capable of hybridizing to a second target sequence in a polynucleotide locus,

[0324] (c) a direct repeat sequence,

[0325] and

II. a Cas13 enzyme or a second polynucleotide sequence encoding it,

[0326] wherein when transcribed, the first and the second guide sequences direct sequence-specific binding of a first and a second Cas13 CRISPR complex to the first and second target sequences respectively,

[0327] wherein the first CRISPR complex comprises the Cas13 enzyme complexed with the first guide sequence that is hybridizable to the first target sequence,

[0328] wherein the second CRISPR complex comprises the Cas13 enzyme complexed with the second guide sequence that is hybridizable to the second target sequence, and

[0329] wherein the first guide sequence directs cleavage of one strand of the DNA duplex near the first target sequence and the second guide sequence directs cleavage of the other strand near the second target sequence inducing a double strand break, thereby modifying the organism or the non-human or non-animal organism. Similarly, compositions comprising more than two guide RNAs can be envisaged e.g. each specific for one target, and arranged tandemly in the composition or CRISPR system or complex as described herein.

[0330] In another embodiment, the Cas13 is delivered into the cell as a protein. In another and particularly preferred embodiment, the Cas13 is delivered into the cell as a protein or as a nucleotide sequence encoding it. Delivery to the cell as a protein may include delivery of a Ribonucleoprotein (RNP) complex, where the protein is complexed with the multiple guides.

[0331] In an aspect, host cells and cell lines modified by or comprising the compositions, systems or modified enzymes of present invention are provided, including stem cells, and progeny thereof.

[0332] In an aspect, methods of cellular therapy are provided, where, for example, a single cell or a population of cells is sampled or cultured, wherein that cell or cells is or has been modified ex vivo as described herein, and is then re-introduced (sampled cells) or introduced (cultured cells) into the organism. Stem cells, whether embryonic or induce pluripotent or totipotent stem cells, are also particularly preferred in this regard. But, of course, in vivo embodiments are also envisaged.

[0333] Inventive methods can further comprise delivery of templates, such as repair templates, which may be dsODN or ssODN, see below. Delivery of templates may be via the cotemporaneous or separate from delivery of any or all the CRISPR enzyme or guide RNAs and via the same delivery mechanism or different. In some embodiments, it is preferred that the template is delivered together with the guide RNAs and, preferably, also the CRISPR enzyme. An example may be an AAV vector where the CRISPR enzyme is AsCas or LbCas.

[0334] Inventive methods can further comprise: (a) delivering to the cell a double-stranded oligodeoxynucleotide (dsODN) comprising overhangs complimentary to the overhangs created by said double strand break, wherein said dsODN is integrated into the locus of interest; or -(b) delivering to the cell a single-stranded oligodeoxynucleotide (ssODN), wherein said ssODN acts as a template for homology directed repair of said double strand break. Inventive methods can be for the prevention or treatment of disease in an individual, optionally wherein said disease is caused by a defect in said locus of interest. Inventive methods can be conducted in vivo in the individual or ex vivo on a cell taken from the individual, optionally wherein said cell is returned to the individual.

[0335] The invention also comprehends products obtained from using CRISPR enzyme or Cas enzyme or Cas13 enzyme or CRISPR-CRISPR enzyme or CRISPR-Cas system or CRISPR-Cas13 system for use in tandem or multiple targeting as defined herein.

### Escorted Guides for the Cas13 CRISPR-Cas System According to the Invention

[0336] In one aspect the invention provides escorted Cas13 CRISPR-Cas systems or complexes, especially such a system involving an escorted Cas13 CRISPR-Cas system guide. By “escorted” is meant that the Cas13 CRISPR-Cas system or complex or guide is delivered to a selected time or place within a cell, so that activity of the Cas13 CRISPR-Cas system or complex or guide is spatially or temporally controlled. For example, the activity and destination of the Cas13 CRISPR-Cas system or complex or guide may be controlled by an escort RNA aptamer sequence that has binding affinity for an aptamer ligand, such as a cell surface protein or other localized cellular component. Alternatively, the escort aptamer may for example be responsive to an aptamer effector on or in the cell, such as a transient effector, such as an external energy source that is applied to the cell at a particular time.

[0337] The escorted Cas13 CRISPR-Cas systems or complexes have a gRNA with a functional structure designed to improve gRNA structure, architecture, stability, genetic expression, or any combination thereof. Such a structure can include an aptamer.

[0338] Aptamers are biomolecules that can be designed or selected to bind tightly to other ligands, for example using a technique called systematic evolution of ligands by exponential enrichment (SELEX; Tuerk C, Gold L: “Systematic evolution of ligands by exponential enrichment: RNA ligands to bacteriophage T4 DNA polymerase.” Science 1990, 249:505-510). Nucleic acid aptamers can for example be selected from pools of random-sequence oligonucleotides, with high binding affinities and specificities for a wide range of biomedically relevant targets, suggesting a wide range of therapeutic utilities for aptamers (Keefe, Anthony D., Supriya Pai, and Andrew Ellington. “Aptamers as therapeutics.” Nature Reviews Drug Discovery 9.7 (2010): 537-550). These characteristics also suggest a wide range of uses for aptamers as drug delivery vehicles (Levy-Nissenbaum, Etgar, et al. “Nanotechnology and aptamers: applications in drug delivery.” Trends in biotechnology 26.8 (2008): 442-449; and, Hicke B J, Stephens A W. “Escort aptamers: a delivery service for diagnosis and therapy.” J Clin Invest 2000, 106:923-928.). Aptamers may also be constructed that function as molecular switches, responding to a que by changing properties, such as RNA aptamers that bind fluorophores to mimic the activity of green fluorescent protein (Paige, Jeremy S., Karen Y. Wu, and Samie R. Jaffrey. “RNA mimics of green fluorescent protein.” Science 333.6042 (2011): 642-646). It has also been suggested that aptamers may be used as components of targeted siRNA therapeutic delivery systems, for example targeting cell surface proteins (Zhou, Jiehua, and John J. Rossi. “Aptamer-targeted cell-specific RNA interference.” Silence 1.1 (2010): 4).

[0339] Accordingly, provided herein is a gRNA modified, e.g., by one or more aptamer(s) designed to improve gRNA delivery, including delivery across the cellular membrane, to intracellular compartments, or into the nucleus. Such a structure can include, either in addition to the one or more aptamer(s) or without such one or more aptamer(s), moiety(ies) so as to render the guide deliverable, inducible or responsive to a selected effector. The invention accordingly comprehends an gRNA that responds to normal or pathological physiological conditions, including without limitation pH, hypoxia, 02 concentration, temperature, protein concentration, enzymatic concentration, lipid structure, light exposure, mechanical disruption (e.g. ultrasound waves), magnetic fields, electric fields, or electromagnetic radiation.

[0340] An aspect of the invention provides non-naturally occurring or engineered composition comprising an escorted guide RNA (egRNA) comprising:

[0341] an RNA guide sequence capable of hybridizing to a target sequence in a genomic locus of interest in a cell; and,

[0342] an escort RNA aptamer sequence, wherein the escort aptamer has binding affinity for an aptamer ligand on or in the cell, or the escort aptamer is responsive to a localized aptamer effector on or in the cell, wherein the presence of the aptamer ligand or effector on or in the cell is spatially or temporally restricted.

[0343] The escort aptamer may for example change conformation in response to an interaction with the aptamer ligand or effector in the cell.

[0344] The escort aptamer may have specific binding affinity for the aptamer ligand.

[0345] The aptamer ligand may be localized in a location or compartment of the cell, for example on or in a membrane of the cell. Binding of the escort aptamer to the aptamer ligand may accordingly direct the egRNA to a location of interest in the cell, such as the interior of the cell by way of binding to an aptamer ligand that is a cell surface ligand. In this way, a variety of spatially restricted locations within the cell may be targeted, such as the cell nucleus or mitochondria.

[0346] Once intended alterations have been introduced, such as by editing intended copies of a gene in the genome of a cell, continued CRISPR/Cas13 expression in that cell is no longer necessary. Indeed, sustained expression would be undesirable in certain casein case of off-target effects at unintended genomic sites, etc. Thus time-limited expression would be useful. Inducible expression offers one approach, but in addition Applicants have engineered a Self-Inactivating Cas13 CRISPR-Cas system that relies on the use of a non-coding guide target sequence within the CRISPR vector itself. Thus, after expression begins, the CRISPR system will lead to its own destruction, but before destruction is complete it will have time to edit the genomic copies of the target gene (which, with a normal point mutation in a diploid cell, requires at most two edits). Simply, the self inactivating Cas13 CRISPR-Cas system includes additional RNA (i.e., guide RNA) that targets the coding sequence for the CRISPR enzyme itself or that targets one or more non-coding guide target sequences complementary to unique sequences present in one or more of the following: (a) within the promoter driving expression of the non-coding RNA elements, (b) within the promoter driving expression of the Cas13 gene, (c) within 100 bp of the ATG translational start codon in the Cas13 coding sequence, (d) within the inverted terminal repeat (iTR) of a viral delivery vector, e.g., in an AAV genome.

[0347] The egRNA may include an RNA aptamer linking sequence, operably linking the escort RNA sequence to the RNA guide sequence.

[0348] In embodiments, the egRNA may include one or more photolabile bonds or non-naturally occurring residues.

[0349] In one aspect, the escort RNA aptamer sequence may be complementary to a target miRNA, which may or may not be present within a cell, so that only when the target miRNA is present is there binding of the escort RNA aptamer sequence to the target miRNA which results in cleavage of the egRNA by an RNA-induced silencing complex (RISC) within the cell.

[0350] In embodiments, the escort RNA aptamer sequence may for example be from 10 to 200 nucleotides in length, and the egRNA may include more than one escort RNA aptamer sequence.

[0351] It is to be understood that any of the RNA guide sequences as described herein elsewhere can be used in the egRNA described herein. In certain embodiments of the invention, the guide RNA or mature crRNA comprises, consists essentially of, or consists of a direct repeat sequence and a guide sequence or spacer sequence. In certain embodiments, the guide RNA or mature crRNA comprises, consists essentially of, or consists of a direct repeat sequence linked to a guide sequence or spacer sequence. In certain embodiments the guide RNA or mature crRNA comprises 19 nts of partial direct repeat followed by 23-25 nt of guide sequence or spacer sequence. In certain embodiments, the effector protein is a FnCas13 effector protein and requires at least 16 nt of guide sequence to achieve detectable DNA cleavage and a minimum of 17 nt of guide sequence to achieve efficient DNA cleavage in vitro. In certain embodiments, the direct repeat sequence is located upstream (i.e., 5′) from the guide sequence or spacer sequence. In a preferred embodiment the seed sequence (i.e. the sequence essential critical for recognition and/or hybridization to the sequence at the target locus) of the FnCas13 guide RNA is approximately within the first 5 nt on the 5′ end of the guide sequence or spacer sequence.

[0352] The egRNA may be included in a non-naturally occurring or engineered Cas13 CRISPR-Cas complex composition, together with a Cas13 which may include at least one mutation, for example a mutation so that the Cas13 has no more than 5% of the nuclease activity of a Cas13 not having the at least one mutation, for example having a diminished nuclease activity of at least 97%, or 100% as compared with the Cas13 not having the at least one mutation. The Cas13 may also include one or more nuclear localization sequences. Mutated Cas13 enzymes having modulated activity such as diminished nuclease activity are described herein elsewhere.

[0353] The engineered Cas13 CRISPR-Cas composition may be provided in a cell, such as a eukaryotic cell, a mammalian cell, or a human cell.

[0354] In embodiments, the compositions described herein comprise a Cas13 CRISPR-Cas complex having at least three functional domains, at least one of which is associated with Cas13 and at least two of which are associated with egRNA.

[0355] The compositions described herein may be used to introduce a genomic locus event in a host cell, such as a eukaryotic cell, in particular a mammalian cell, or a non-human eukaryote, in particular a non-human mammal such as a mouse, in vivo. The genomic locus event may comprise affecting gene activation, gene inhibition, or cleavage in a locus. The compositions described herein may also be used to modify a genomic locus of interest to change gene expression in a cell. Methods of introducing a genomic locus event in a host cell using the Cas13 enzyme provided herein are described herein in detail elsewhere. Delivery of the composition may for example be by way of delivery of a nucleic acid molecule(s) coding for the composition, which nucleic acid molecule(s) is operatively linked to regulatory sequence(s), and expression of the nucleic acid molecule(s) in vivo, for example by way of a lentivirus, an adenovirus, or an AAV.

[0356] The present invention provides compositions and methods by which gRNA-mediated gene editing activity can be adapted. The invention provides gRNA secondary structures that improve cutting efficiency by increasing gRNA and/or increasing the amount of RNA delivered into the cell. The gRNA may include light labile or inducible nucleotides.

[0357] To increase the effectiveness of gRNA, for example gRNA delivered with viral or non-viral technologies, Applicants added secondary structures into the gRNA that enhance its stability and improve gene editing. Separately, to overcome the lack of effective delivery, Applicants modified gRNAs with cell penetrating RNA aptamers; the aptamers bind to cell surface receptors and promote the entry of gRNAs into cells. Notably, the cell-penetrating aptamers can be designed to target specific cell receptors, in order to mediate cell-specific delivery. Applicants also have created guides that are inducible.

[0358] Light responsiveness of an inducible system may be achieved via the activation and binding of cryptochrome-2 and CIB 1. Blue light stimulation induces an activating conformational change in cryptochrome-2, resulting in recruitment of its binding partner CIB1. This binding is fast and reversible, achieving saturation in <15 sec following pulsed stimulation and returning to baseline <15 min after the end of stimulation. These rapid binding kinetics result in a system temporally bound only by the speed of transcription/translation and transcript/protein degradation, rather than uptake and clearance of inducing agents. Crytochrome-2 activation is also highly sensitive, allowing for the use of low light intensity stimulation and mitigating the risks of phototoxicity. Further, in a context such as the intact mammalian brain, variable light intensity may be used to control the size of a stimulated region, allowing for greater precision than vector delivery alone may offer.

[0359] The invention contemplates energy sources such as electromagnetic radiation, sound energy or thermal energy to induce the guide. Advantageously, the electromagnetic radiation is a component of visible light. In a preferred embodiment, the light is a blue light with a wavelength of about 450 to about 495 nm. In an especially preferred embodiment, the wavelength is about 488 nm. In another preferred embodiment, the light stimulation is via pulses. The light power may range from about 0-9 mW/cm2. In a preferred embodiment, a stimulation paradigm of as low as 0.25 sec every 15 sec should result in maximal activation.

[0360] Cells involved in the practice of the present invention may be a prokaryotic cell or a eukaryotic cell, advantageously an animal cell a plant cell or a yeast cell, more advantageously a mammalian cell.

[0361] The chemical or energy sensitive guide may undergo a conformational change upon induction by the binding of a chemical source or by the energy allowing it act as a guide and have the Cas13 CRISPR-Cas system or complex function. The invention can involve applying the chemical source or energy so as to have the guide function and the Cas13 CRISPR-Cas system or complex function; and optionally further determining that the expression of the genomic locus is altered.

[0362] There are several different designs of this chemical inducible system: 1. ABI-PYL based system inducible by Abscisic Acid (ABA) (see, e.g., http://stke.sciencemag.org/cgi/content/abstract/sigtrans; 4/164/r52), 2. FKBP-FRB based system inducible by rapamycin (or related chemicals based on rapamycin) (see, e.g., http://www.nature.com/nmeth/journal/v2/n6/full/nmeth763.html), 3. GID1-GAI based system inducible by Gibberellin (GA) (see, e.g., http://www.nature.com/nchembio/journal/v8/n5/full/nchembio.922.html).

[0363] Another system contemplated by the present invention is a chemical inducible system based on change in sub-cellular localization. Applicants also developed a system in which the polypeptide include a DNA binding domain comprising at least five or more Transcription activator-like effector (TALE) monomers and at least one or more half-monomers specifically ordered to target the genomic locus of interest linked to at least one or more effector domains are further linker to a chemical or energy sensitive protein. This protein will lead to a change in the sub-cellular localization of the entire polypeptide (i.e. transportation of the entire polypeptide from cytoplasm into the nucleus of the cells) upon the binding of a chemical or energy transfer to the chemical or energy sensitive protein. This transportation of the entire polypeptide from one sub-cellular compartments or organelles, in which its activity is sequestered due to lack of substrate for the effector domain, into another one in which the substrate is present would allow the entire polypeptide to come in contact with its desired substrate (i.e. genomic DNA in the mammalian nucleus) and result in activation or repression of target gene expression.

[0364] This type of system could also be used to induce the cleavage of a genomic locus of interest in a cell when the effector domain is a nuclease.

[0365] A chemical inducible system can be an estrogen receptor (ER) based system inducible by 4-hydroxytamoxifen (4OHT) (see, e.g., http://www.pnas.org/content/104/3/1027.abstract). A mutated ligand-binding domain of the estrogen receptor called ERT2 translocates into the nucleus of cells upon binding of 4-hydroxytamoxifen. In further embodiments of the invention any naturally occurring or engineered derivative of any nuclear receptor, thyroid hormone receptor, retinoic acid receptor, estrogen receptor, estrogen-related receptor, glucocorticoid receptor, progesterone receptor, androgen receptor may be used in inducible systems analogous to the ER based inducible system.

[0366] Another inducible system is based on the design using Transient receptor potential (TRP) ion channel based system inducible by energy, heat or radio-wave (see, e.g., http://www.sciencemag.org/content/336/6081/604). These TRP family proteins respond to different stimuli, including light and heat. When this protein is activated by light or heat, the ion channel will open and allow the entering of ions such as calcium into the plasma membrane. This influx of ions will bind to intracellular ion interacting partners linked to a polypeptide including the guide and the other components of the Cas13 CRISPR-Cas complex or system, and the binding will induce the change of sub-cellular localization of the polypeptide, leading to the entire polypeptide entering the nucleus of cells. Once inside the nucleus, the guide protein and the other components of the Cas13 CRISPR-Cas complex will be active and modulating target gene expression in cells.

[0367] This type of system could also be used to induce the cleavage of a genomic locus of interest in a cell; and, in this regard, it is noted that the Cas13 enzyme is a nuclease. The light could be generated with a laser or other forms of energy sources. The heat could be generated by raise of temperature results from an energy source, or from nano-particles that release heat after absorbing energy from an energy source delivered in the form of radio-wave.

[0368] While light activation may be an advantageous embodiment, sometimes it may be disadvantageous especially for in vivo applications in which the light may not penetrate the skin or other organs. In this instance, other methods of energy activation are contemplated, in particular, electric field energy and/or ultrasound which have a similar effect.

[0369] Electric field energy is preferably administered substantially as described in the art, using one or more electric pulses of from about 1 Volt/cm to about 10 kVolts/cm under in vivo conditions. Instead of or in addition to the pulses, the electric field may be delivered in a continuous manner. The electric pulse may be applied for between 1¬μs and 500 milliseconds, preferably between 1¬μs and 100 milliseconds. The electric field may be applied continuously or in a pulsed manner for 5 about minutes.

[0370] As used herein, ‘electric field energy’ is the electrical energy to which a cell is exposed. Preferably the electric field has a strength of from about 1 Volt/cm to about 10 kVolts/cm or more under in vivo conditions (see WO97/49450).

[0371] As used herein, the term “electric field” includes one or more pulses at variable capacitance and voltage and including exponential and/or square wave and/or modulated wave and/or modulated square wave forms. References to electric fields and electricity should be taken to include reference the presence of an electric potential difference in the environment of a cell. Such an environment may be set up by way of static electricity, alternating current (AC), direct current (DC), etc, as known in the art. The electric field may be uniform, non-uniform or otherwise, and may vary in strength and/or direction in a time dependent manner.

[0372] Single or multiple applications of electric field, as well as single or multiple applications of ultrasound are also possible, in any order and in any combination. The ultrasound and/or the electric field may be delivered as single or multiple continuous applications, or as pulses (pulsatile delivery).

[0373] Electroporation has been used in both in vitro and in vivo procedures to introduce foreign material into living cells. With in vitro applications, a sample of live cells is first mixed with the agent of interest and placed between electrodes such as parallel plates. Then, the electrodes apply an electrical field to the cell/implant mixture. Examples of systems that perform in vitro electroporation include the Electro Cell Manipulator ECM600 product, and the Electro Square Porator T820, both made by the BTX Division of Genetronics, Inc (see U.S. Pat. No. 5,869,326).

[0374] The known electroporation techniques (both in vitro and in vivo) function by applying a brief high voltage pulse to electrodes positioned around the treatment region. The electric field generated between the electrodes causes the cell membranes to temporarily become porous, whereupon molecules of the agent of interest enter the cells. In known electroporation applications, this electric field comprises a single square wave pulse on the order of 1000 V/cm, of about 100.mu.s duration. Such a pulse may be generated, for example, in known applications of the Electro Square Porator T820.

[0375] Preferably, the electric field has a strength of from about 1 V/cm to about 10 kV/cm under in vitro conditions. Thus, the electric field may have a strength of 1 V/cm, 2 V/cm, 3 V/cm, 4 V/cm, 5 V/cm, 6 V/cm, 7 V/cm, 8 V/cm, 9 V/cm, 10 V/cm, 20 V/cm, 50 V/cm, 100 V/cm, 200 V/cm, 300 V/cm, 400 V/cm, 500 V/cm, 600 V/cm, 700 V/cm, 800 V/cm, 900 V/cm, 1 kV/cm, 2 kV/cm, 5 kV/cm, 10 kV/cm, 20 kV/cm, 50 kV/cm or more. More preferably from about 0.5 kV/cm to about 4.0 kV/cm under in vitro conditions. Preferably the electric field has a strength of from about 1 V/cm to about 10 kV/cm under in vivo conditions. However, the electric field strengths may be lowered where the number of pulses delivered to the target site are increased. Thus, pulsatile delivery of electric fields at lower field strengths is envisaged.

[0376] Preferably the application of the electric field is in the form of multiple pulses such as double pulses of the same strength and capacitance or sequential pulses of varying strength and/or capacitance. As used herein, the term “pulse” includes one or more electric pulses at variable capacitance and voltage and including exponential and/or square wave and/or modulated wave/square wave forms.

[0377] Preferably the electric pulse is delivered as a waveform selected from an exponential wave form, a square wave form, a modulated wave form and a modulated square wave form.

[0378] A preferred embodiment employs direct current at low voltage. Thus, Applicants disclose the use of an electric field which is applied to the cell, tissue or tissue mass at a field strength of between 1V/cm and 20V/cm, for a period of 100 milliseconds or more, preferably 15 minutes or more.

[0379] Ultrasound is advantageously administered at a power level of from about 0.05 W/cm2 to about 100 W/cm2. Diagnostic or therapeutic ultrasound may be used, or combinations thereof.

[0380] As used herein, the term “ultrasound” refers to a form of energy which consists of mechanical vibrations the frequencies of which are so high they are above the range of human hearing. Lower frequency limit of the ultrasonic spectrum may generally be taken as about 20 kHz. Most diagnostic applications of ultrasound employ frequencies in the range 1 and 15 MHz′ (From Ultrasonics in Clinical Diagnosis, P. N. T. Wells, ed., 2nd. Edition, Publ. Churchill Livingstone [Edinburgh, London & NY, 1977]).

[0381] Ultrasound has been used in both diagnostic and therapeutic applications. When used as a diagnostic tool (“diagnostic ultrasound”), ultrasound is typically used in an energy density range of up to about 100 mW/cm2 (FDA recommendation), although energy densities of up to 750 mW/cm2 have been used. In physiotherapy, ultrasound is typically used as an energy source in a range up to about 3 to 4 W/cm2 (WHO recommendation). In other therapeutic applications, higher intensities of ultrasound may be employed, for example, HIFU at 100 W/cm up to 1 kW/cm2 (or even higher) for short periods of time. The term “ultrasound” as used in this specification is intended to encompass diagnostic, therapeutic and focused ultrasound.

[0382] Focused ultrasound (FUS) allows thermal energy to be delivered without an invasive probe (see Morocz et al 1998 Journal of Magnetic Resonance Imaging Vol. 8, No. 1, pp. 136-142. Another form of focused ultrasound is high intensity focused ultrasound (HIFU) which is reviewed by Moussatov et al in Ultrasonics (1998) Vol. 36, No. 8, pp. 893-900 and TranHuuHue et al in Acustica (1997) Vol. 83, No. 6, pp. 1103-1106.

[0383] Preferably, a combination of diagnostic ultrasound and a therapeutic ultrasound is employed. This combination is not intended to be limiting, however, and the skilled reader will appreciate that any variety of combinations of ultrasound may be used. Additionally, the energy density, frequency of ultrasound, and period of exposure may be varied.

[0384] Preferably the exposure to an ultrasound energy source is at a power density of from about 0.05 to about 100 Wcm-2. Even more preferably, the exposure to an ultrasound energy source is at a power density of from about 1 to about 15 Wcm-2.

[0385] Preferably the exposure to an ultrasound energy source is at a frequency of from about 0.015 to about 10.0 MHz. More preferably the exposure to an ultrasound energy source is at a frequency of from about 0.02 to about 5.0 MHz or about 6.0 MHz. Most preferably, the ultrasound is applied at a frequency of 3 MHz.

[0386] Preferably the exposure is for periods of from about 10 milliseconds to about 60 minutes. Preferably the exposure is for periods of from about 1 second to about 5 minutes. More preferably, the ultrasound is applied for about 2 minutes. Depending on the particular target cell to be disrupted, however, the exposure may be for a longer duration, for example, for 15 minutes.

[0387] Advantageously, the target tissue is exposed to an ultrasound energy source at an acoustic power density of from about 0.05 Wcm-2 to about 10 Wcm-2 with a frequency ranging from about 0.015 to about 10 MHz (see WO 98/52609). However, alternatives are also possible, for example, exposure to an ultrasound energy source at an acoustic power density of above 100 Wcm-2, but for reduced periods of time, for example, 1000 Wcm-2 for periods in the millisecond range or less.

[0388] Preferably the application of the ultrasound is in the form of multiple pulses; thus, both continuous wave and pulsed wave (pulsatile delivery of ultrasound) may be employed in any combination. For example, continuous wave ultrasound may be applied, followed by pulsed wave ultrasound, or vice versa. This may be repeated any number of times, in any order and combination. The pulsed wave ultrasound may be applied against a background of continuous wave ultrasound, and any number of pulses may be used in any number of groups.

[0389] Preferably, the ultrasound may comprise pulsed wave ultrasound. In a highly preferred embodiment, the ultrasound is applied at a power density of 0.7 Wcm-2 or 1.25 Wcm-2 as a continuous wave. Higher power densities may be employed if pulsed wave ultrasound is used.

[0390] Use of ultrasound is advantageous as, like light, it may be focused accurately on a target. Moreover, ultrasound is advantageous as it may be focused more deeply into tissues unlike light. It is therefore better suited to whole-tissue penetration (such as but not limited to a lobe of the liver) or whole organ (such as but not limited to the entire liver or an entire muscle, such as the heart) therapy. Another important advantage is that ultrasound is a non-invasive stimulus which is used in a wide variety of diagnostic and therapeutic applications. By way of example, ultrasound is well known in medical imaging techniques and, additionally, in orthopedic therapy. Furthermore, instruments suitable for the application of ultrasound to a subject vertebrate are widely available and their use is well known in the art.

[0391] The rapid transcriptional response and endogenous targeting of the instant invention make for an ideal system for the study of transcriptional dynamics. For example, the instant invention may be used to study the dynamics of variant production upon induced expression of a target gene. On the other end of the transcription cycle, mRNA degradation studies are often performed in response to a strong extracellular stimulus, causing expression level changes in a plethora of genes. The instant invention may be utilized to reversibly induce transcription of an endogenous target, after which point stimulation may be stopped and the degradation kinetics of the unique target may be tracked.

[0392] The temporal precision of the instant invention may provide the power to time genetic regulation in concert with experimental interventions. For example, targets with suspected involvement in long-term potentiation (LTP) may be modulated in organotypic or dissociated neuronal cultures, but only during stimulus to induce LTP, so as to avoid interfering with the normal development of the cells. Similarly, in cellular models exhibiting disease phenotypes, targets suspected to be involved in the effectiveness of a particular therapy may be modulated only during treatment. Conversely, genetic targets may be modulated only during a pathological stimulus. Any number of experiments in which timing of genetic cues to external experimental stimuli is of relevance may potentially benefit from the utility of the instant invention.

[0393] The in vivo context offers equally rich opportunities for the instant invention to control gene expression. Photoinducibility provides the potential for spatial precision. Taking advantage of the development of optrode technology, a stimulating fiber optic lead may be placed in a precise brain region. Stimulation region size may then be tuned by light intensity. This may be done in conjunction with the delivery of the Cas13 CRISPR-Cas system or complex of the invention, or, in the case of transgenic Cas13 animals, guide RNA of the invention may be delivered and the optrode technology can allow for the modulation of gene expression in precise brain regions. A transparent Cas13 expressing organism, can have guide RNA of the invention administered to it and then there can be extremely precise laser induced local gene expression changes.

[0394] A culture medium for culturing host cells includes a medium commonly used for tissue culture, such as M199-earle base, Eagle MEM (E-MEM), Dulbecco MEM (DMEM), SC-UCM102, UP-SFM (GIBCO BRL), EX-CELL302 (Nichirei), EX-CELL293-S(Nichirei), TFBM-01 (Nichirei), ASF104, among others. Suitable culture media for specific cell types may be found at the American Type Culture Collection (ATCC) or the European Collection of Cell Cultures (ECACC). Culture media may be supplemented with amino acids such as L-glutamine, salts, anti-fungal or anti-bacterial agents such as Fungizone¬Æ, penicillin-streptomycin, animal serum, and the like. The cell culture medium may optionally be serum-free.

[0395] The invention may also offer valuable temporal precision in vivo. The invention may be used to alter gene expression during a particular stage of development. The invention may be used to time a genetic cue to a particular experimental window. For example, genes implicated in learning may be overexpressed or repressed only during the learning stimulus in a precise region of the intact rodent or primate brain. Further, the invention may be used to induce gene expression changes only during particular stages of disease development. For example, an oncogene may be overexpressed only once a tumor reaches a particular size or metastatic stage. Conversely, proteins suspected in the development of Alzheimer's may be knocked down only at defined time points in the animal's life and within a particular brain region. Although these examples do not exhaustively list the potential applications of the invention, they highlight some of the areas in which the invention may be a powerful technology.

Protected Guides: Enzymes According to the Invention can be Used in Combination with Protected Guide RNAs

[0396] In one aspect, an object of the current invention is to further enhance the specificity of Cas13 given individual guide RNAs through thermodynamic tuning of the binding specificity of the guide RNA to target DNA. This is a general approach of introducing mismatches, elongation or truncation of the guide sequence to increase/decrease the number of complimentary bases vs. mismatched bases shared between a genomic target and its potential off-target loci, in order to give thermodynamic advantage to targeted genomic loci over genomic off-targets.

[0397] In one aspect, the invention provides for the guide sequence being modified by secondary structure to increase the specificity of the Cas13 CRISPR-Cas system and whereby the secondary structure can protect against exonuclease activity and allow for 3′ additions to the guide sequence.

[0398] In one aspect, the invention provides for hybridizing a “protector RNA” to a guide sequence, wherein the “protector RNA” is an RNA strand complementary to the 5′ end of the guide RNA (gRNA), to thereby generate a partially double-stranded gRNA. In an embodiment of the invention, protecting the mismatched bases with a perfectly complementary protector sequence decreases the likelihood of target DNA binding to the mismatched base pairs at the 3′ end. In embodiments of the invention, additional sequences comprising an extended length may also be present.

[0399] Guide RNA (gRNA) extensions matching the genomic target provide gRNA protection and enhance specificity. Extension of the gRNA with matching sequence distal to the end of the spacer seed for individual genomic targets is envisaged to provide enhanced specificity. Matching gRNA extensions that enhance specificity have been observed in cells without truncation. Prediction of gRNA structure accompanying these stable length extensions has shown that stable forms arise from protective states, where the extension forms a closed loop with the gRNA seed due to complimentary sequences in the spacer extension and the spacer seed. These results demonstrate that the protected guide concept also includes sequences matching the genomic target sequence distal of the 20mer spacer-binding region. Thermodynamic prediction can be used to predict completely matching or partially matching guide extensions that result in protected gRNA states. This extends the concept of protected gRNAs to interaction between X and Z, where X will generally be of length 17-20 nt and Z is of length 1-30 nt. Thermodynamic prediction can be used to determine the optimal extension state for Z, potentially introducing small numbers of mismatches in Z to promote the formation of protected conformations between X and Z. Throughout the present application, the terms “X” and seed length (SL) are used interchangeably with the term exposed length (EpL) which denotes the number of nucleotides available for target DNA to bind; the terms “Y” and protector length (PL) are used interchangeably to represent the length of the protector; and the terms “Z”, “E”, “E” and “EL” are used interchangeably to correspond to the term extended length (ExL) which represents the number of nucleotides by which the target sequence is extended.

[0400] An extension sequence which corresponds to the extended length (ExL) may optionally be attached directly to the guide sequence at the 3′ end of the protected guide sequence. The extension sequence may be 2 to 12 nucleotides in length. Preferably ExL may be denoted as 0, 2, 4, 6, 8, 10 or 12 nucleotides in length. In a preferred embodiment the ExL is denoted as 0 or 4 nucleotides in length. In a more preferred embodiment the ExL is 4 nucleotides in length. The extension sequence may or may not be complementary to the target sequence.

[0401] An extension sequence may further optionally be attached directly to the guide sequence at the 5′ end of the protected guide sequence as well as to the 3′ end of a protecting sequence. As a result, the extension sequence serves as a linking sequence between the protected sequence and the protecting sequence. Without wishing to be bound by theory, such a link may position the protecting sequence near the protected sequence for improved binding of the protecting sequence to the protected sequence. It will be understood that the above-described relationship of seed, protector, and extension applies where the distal end (i.e., the targeting end) of the guide is the 5′ end, e.g. a guide that functions is a Cas13 system. In an embodiment wherein the distal end of the guide is the 3′ end, the relationship will be the reverse. In such an embodiment, the invention provides for hybridizing a “protector RNA” to a guide sequence, wherein the “protector RNA” is an RNA strand complementary to the 3′ end of the guide RNA (gRNA), to thereby generate a partially double-stranded gRNA.

[0402] Addition of gRNA mismatches to the distal end of the gRNA can demonstrate enhanced specificity. The introduction of unprotected distal mismatches in Y or extension of the gRNA with distal mismatches (Z) can demonstrate enhanced specificity. This concept as mentioned is tied to X, Y, and Z components used in protected gRNAs. The unprotected mismatch concept may be further generalized to the concepts of X, Y, and Z described for protected guide RNAs.

[0403] Cas13. In one aspect, the invention provides for enhanced Cas13 specificity wherein the double stranded 3′ end of the protected guide RNA (pgRNA) allows for two possible outcomes: (1) the guide RNA-protector RNA to guide RNA-target DNA strand exchange will occur and the guide will fully bind the target, or (2) the guide RNA will fail to fully bind the target and because Cas13 target cleavage is a multiple step kinetic reaction that requires guide RNA:target DNA binding to activate Cas13-catalyzed DSBs, wherein Cas13 cleavage does not occur if the guide RNA does not properly bind. According to particular embodiments, the protected guide RNA improves specificity of target binding as compared to a naturally occurring CRISPR-Cas system. According to particular embodiments the protected modified guide RNA improves stability as compared to a naturally occurring CRISPR-Cas. According to particular embodiments the protector sequence has a length between 3 and 120 nucleotides and comprises 3 or more contiguous nucleotides complementary to another sequence of guide or protector. According to particular embodiments, the protector sequence forms a hairpin. According to particular embodiments the guide RNA further comprises a protected sequence and an exposed sequence. According to particular embodiments the exposed sequence is 1 to 19 nucleotides. More particularly, the exposed sequence is at least 75%, at least 90% or about 100% complementary to the target sequence. According to particular embodiments the guide sequence is at least 90% or about 100% complementary to the protector strand. According to particular embodiments the guide sequence is at least 75%, at least 90% or about 100% complementary to the target sequence. According to particular embodiments, the guide RNA further comprises an extension sequence. More particularly, when the distal end of the guide is the 3′ end, the extension sequence is operably linked to the 3′ end of the protected guide sequence, and optionally directly linked to the 3′ end of the protected guide sequence. According to particular embodiments the extension sequence is 1-12 nucleotides. According to particular embodiments the extension sequence is operably linked to the guide sequence at the 3′ end of the protected guide sequence and the 5′ end of the protector strand and optionally directly linked to the 3′ end of the protected guide sequence and the 53′ end of the protector strand, wherein the extension sequence is a linking sequence between the protected sequence and the protector strand. According to particular embodiments the extension sequence is 100% not complementary to the protector strand, optionally at least 95%, at least 90%, at least 80%, at least 70%, at least 60%, or at least 50% not complementary to the protector strand. According to particular embodiments the guide sequence further comprises mismatches appended to the end of the guide sequence, wherein the mismatches thermodynamically optimize specificity.

[0404] According to the invention, in certain embodiments, guide modifications that impede strand invasion will be desirable. For example, to minimize off-target activity, in certain embodiments, it will be desirable to design or modify a guide to impede strand invasion at off-target sites. In certain such embodiments, it may be acceptable or useful to design or modify a guide at the expense of on-target binding efficiency. In certain embodiments, guide-target mismatches at the target site may be tolerated that substantially reduce off-target activity.

[0405] In certain embodiments of the invention, it is desirable to adjust the binding characteristics of the protected guide to minimize off-target CRISPR activity. Accordingly, thermodynamic prediction algorithms are used to predict strengths of binding on target and off target. Alternatively or in addition, selection methods are used to reduce or minimize off-target effects, by absolute measures or relative to on-target effects.

[0406] Design options include, without limitation, i) adjusting the length of protector strand that binds to the protected strand, ii) adjusting the length of the portion of the protected strand that is exposed, iii) extending the protected strand with a stem-loop located external (distal) to the protected strand (i.e. designed so that the stem loop is external to the protected strand at the distal end), iv) extending the protected strand by addition of a protector strand to form a stem-loop with all or part of the protected strand, v) adjusting binding of the protector strand to the protected strand by designing in one or more base mismatches and/or one or more non-canonical base pairings, vi) adjusting the location of the stem formed by hybridization of the protector strand to the protected strand, and vii) addition of a non-structured protector to the end of the protected strand.

[0407] In one aspect, the invention provides an engineered, non-naturally occurring CRISPR-Cas system comprising a Cas13 protein and a protected guide RNA that targets a DNA molecule encoding a gene product in a cell, whereby the protected guide RNA targets the DNA molecule encoding the gene product and the Cas13 protein cleaves the DNA molecule encoding the gene product, whereby expression of the gene product is altered; and, wherein the Cas13 protein and the protected guide RNA do not naturally occur together. The invention comprehends the protected guide RNA comprising a guide sequence fused 3′ to a direct repeat sequence. The invention further comprehends the Cas13 CRISPR protein being codon optimized for expression in a eEukaryotic cell. In a preferred embodiment the eEukaryotic cell is a mammalian cell, a plant cell or a yeast cell and in a more preferred embodiment the mammalian cell is a human cell. In a further embodiment of the invention, the expression of the gene product is decreased. In some embodiments the CRISPR protein is Cas13. In some embodiments the CRISPR protein is Cas12a. In some embodiments, the Cas13 or Cas12a enzyme protein is Acidaminococcus sp. BV3L6, Lachnospiraceae bacterium or Francisella Novicida Cas13 or Cas12a, and may include mutated Cas13 or Cas12a derived from these organisms. The enzyme protein may be a further Cas13 or Cas12a homolog or ortholog. In some embodiments, the nucleotide sequence encoding the Cfp1 Csa13 or Cas12a enzyme protein is codon-optimized for expression in a eukaryotic cell. In some embodiments, the Cas13 or Cas12a enzyme protein directs cleavage of one or two strands at the location of the target sequence. In some embodiments, the first regulatory element is a polymerase III promoter. In some embodiments, the second regulatory element is a polymerase II promoter. In general, and throughout this specification, the term “vector” refers to a nucleic acid molecule capable of transporting another nucleic acid to which it has been linked. Vectors include, but are not limited to, nucleic acid molecules that are single-stranded, double-stranded, or partially double-stranded; nucleic acid molecules that comprise one or more free ends, no free ends (e.g., circular); nucleic acid molecules that comprise DNA, RNA, or both; and other varieties of polynucleotides known in the art. One type of vector is a “plasmid,” which refers to a circular double stranded DNA loop into which additional DNA segments can be inserted, such as by standard molecular cloning techniques. Another type of vector is a viral vector, wherein virally-derived DNA or RNA sequences are present in the vector for packaging into a virus (e.g., retroviruses, replication defective retroviruses, adenoviruses, replication defective adenoviruses, and adeno-associated viruses). Viral vectors also include polynucleotides carried by a virus for transfection into a host cell. Certain vectors are capable of autonomous replication in a host cell into which they are introduced (e.g., bacterial vectors having a bacterial origin of replication and episomal mammalian vectors). Other vectors (e.g., non-episomal mammalian vectors) are integrated into the genome of a host cell upon introduction into the host cell, and thereby are replicated along with the host genome. Moreover, certain vectors are capable of directing the expression of genes to which they are operatively-linked. Such vectors are referred to herein as “expression vectors.” Common expression vectors of utility in recombinant DNA techniques are often in the form of plasmids.

[0408] Recombinant expression vectors can comprise a nucleic acid of the invention in a form suitable for expression of the nucleic acid in a host cell, which means that the recombinant expression vectors include one or more regulatory elements, which may be selected on the basis of the host cells to be used for expression, that is operatively-linked to the nucleic acid sequence to be expressed. Within a recombinant expression vector, “operably linked” is intended to mean that the nucleotide sequence of interest is linked to the regulatory element(s) in a manner that allows for expression of the nucleotide sequence (e.g., in an in vitro transcription/translation system or in a host cell when the vector is introduced into the host cell).

[0409] Advantageous vectors include lentiviruses and adeno-associated viruses, and types of such vectors can also be selected for targeting particular types of cells.

[0410] In one aspect, the invention provides a eukaryotic host cell comprising (a) a first regulatory element operably linked to a direct repeat sequence and one or more insertion sites for inserting one or more guide sequences downstream of the direct repeat sequence, wherein when expressed, the guide sequence directs sequence-specific binding of a CRISPR complex to a target sequence in a eukaryotic cell, wherein the CRISPR complex comprises a CRISPR enzyme complexed with the guide RNA comprising the guide sequence that is hybridized to the target sequence and/or (b) a second regulatory element operably linked to an enzyme-coding sequence encoding said Cas13 enzyme comprising a nuclear localization sequence. In some embodiments, the host cell comprises components (a) and (b). In some embodiments, component (a), component (b), or components (a) and (b) are stably integrated into a genome of the host eukaryotic cell. In some embodiments, component (a) further comprises two or more guide sequences operably linked to the first regulatory element, wherein when expressed, each of the two or more guide sequences direct sequence specific binding of a CRISPR complex to a different target sequence in a eukaryotic cell. In some embodiments, the Cas13 enzyme directs cleavage of one or two strands at the location of the target sequence. In some embodiments, the Cas13 enzyme lacks RNA strand cleavage activity. In some embodiments, the first regulatory element is a polymerase III promoter. In some embodiments, the second regulatory element is a polymerase II promoter.

[0411] In an aspect, the invention provides a non-human eukaryotic organism; preferably a multicellular eukaryotic organism, comprising a eukaryotic host cell according to any of the described embodiments. In other aspects, the invention provides a eukaryotic organism; preferably a multicellular eukaryotic organism, comprising a eukaryotic host cell according to any of the described embodiments. The organism in some embodiments of these aspects may be an animal; for example a mammal. Also, the organism may be an arthropod such as an insect. The organism also may be a plant or a yeast. Further, the organism may be a fungus.

[0412] In one aspect, the invention provides a kit comprising one or more of the components described herein above. In some embodiments, the kit comprises a vector system and instructions for using the kit. In some embodiments, the vector system comprises (a) a first regulatory element operably linked to a direct repeat sequence and one or more insertion sites for inserting one or more guide sequences downstream of the direct repeat sequence, wherein when expressed, the guide sequence directs sequence-specific binding of a Cas13 CRISPR complex to a target sequence in a eukaryotic cell, wherein the CRISPR complex comprises a Cas13 enzyme complexed with the protected guide RNA comprising the guide sequence that is hybridized to the target sequence and/or (b) a second regulatory element operably linked to an enzyme-coding sequence encoding said Cas13 enzyme comprising a nuclear localization sequence. In some embodiments, the kit comprises components (a) and (b) located on the same or different vectors of the system. In some embodiments, component (a) further comprises two or more guide sequences operably linked to the first regulatory element, wherein when expressed, each of the two or more guide sequences direct sequence specific binding of a CRISPR complex to a different target sequence in a eukaryotic cell. In some embodiments, the Cas13 enzyme comprises one or more nuclear localization sequences of sufficient strength to drive accumulation of said Cas13 enzyme in a detectable amount in the nucleus of a eukaryotic cell. In some embodiments, the Cas13 enzyme is Acidaminococcus sp. BV3L6, Lachnospiraceae bacterium MA2020 or Francisella tularensis 1 Novicida Cas13, and may include mutated Cas13 derived from these organisms. The enzyme may be a Cas13 homolog or ortholog. In some embodiments, the CRISPR enzyme is codon-optimized for expression in a eukaryotic cell. In some embodiments, the CRISPR enzyme directs cleavage of one or two strands at the location of the target sequence. In some embodiments, the CRISPR enzyme lacks DNA strand cleavage activity. In some embodiments, the first regulatory element is a polymerase III promoter. In some embodiments, the second regulatory element is a polymerase II promoter.

[0413] In one aspect, the invention provides a method of modifying a target polynucleotide in a eukaryotic cell. In some embodiments, the method comprises allowing a CRISPR complex to bind to the target polynucleotide to effect cleavage of said target polynucleotide thereby modifying the target polynucleotide, wherein the CRISPR complex comprises a Cas13 enzyme complexed with protected guide RNA comprising a guide sequence hybridized to a target sequence within said target polynucleotide. In some embodiments, said cleavage comprises cleaving one or two strands at the location of the target sequence by said Cas13 enzyme. In some embodiments, said cleavage results in decreased transcription of a target gene. In some embodiments, the method further comprises repairing said cleaved target polynucleotide by non-homologous end joining (NHEJ)-based gene insertion mechanisms, more particularly with an exogenous template polynucleotide, wherein said repair results in a mutation comprising an insertion, deletion, or substitution of one or more nucleotides of said target polynucleotide. In some embodiments, said mutation results in one or more amino acid changes in a protein expressed from a gene comprising the target sequence. In some embodiments, the method further comprises delivering one or more vectors to said eukaryotic cell, wherein the one or more vectors drive expression of one or more of: the Cas13 enzyme, the protected guide RNA comprising the guide sequence linked to direct repeat sequence. In some embodiments, said vectors are delivered to the eukaryotic cell in a subject. In some embodiments, said modifying takes place in said eukaryotic cell in a cell culture. In some embodiments, the method further comprises isolating said eukaryotic cell from a subject prior to said modifying. In some embodiments, the method further comprises returning said eukaryotic cell and/or cells derived therefrom to said subject.

[0414] In one aspect, the invention provides a method of modifying expression of a polynucleotide in a eukaryotic cell. In some embodiments, the method comprises allowing a Cas13 CRISPR complex to bind to the polynucleotide such that said binding results in increased or decreased expression of said polynucleotide; wherein the CRISPR complex comprises a Cas13 enzyme complexed with a protected guide RNA comprising a guide sequence hybridized to a target sequence within said polynucleotide. In some embodiments, the method further comprises delivering one or more vectors to said eukaryotic cells, wherein the one or more vectors drive expression of one or more of: the Cas13 enzyme and the protected guide RNA.

[0415] In one aspect, the invention provides a method of generating a model eukaryotic cell comprising a mutated disease gene. In some embodiments, a disease gene is any gene associated an increase in the risk of having or developing a disease. In some embodiments, the method comprises (a) introducing one or more vectors into a eukaryotic cell, wherein the one or more vectors drive expression of one or more of: a Cas13 enzyme and a protected guide RNA comprising a guide sequence linked to a direct repeat sequence; and (b) allowing a CRISPR complex to bind to a target polynucleotide to effect cleavage of the target polynucleotide within said disease gene, wherein the CRISPR complex comprises the Cas13 enzyme complexed with the guide RNA comprising the sequence that is hybridized to the target sequence within the target polynucleotide, thereby generating a model eukaryotic cell comprising a mutated disease gene. In some embodiments, said cleavage comprises cleaving one or two strands at the location of the target sequence by said Cas13 enzyme. In some embodiments, said cleavage results in decreased transcription of a target gene. In some embodiments, the method further comprises repairing said cleaved target polynucleotide by non-homologous end joining (NHEJ)-based gene insertion mechanisms with an exogenous template polynucleotide, wherein said repair results in a mutation comprising an insertion, deletion, or substitution of one or more nucleotides of said target polynucleotide. In some embodiments, said mutation results in one or more amino acid changes in a protein expression from a gene comprising the target sequence.

[0416] In one aspect, the invention provides a method for developing a biologically active agent that modulates a cell signaling event associated with a disease gene. In some embodiments, a disease gene is any gene associated an increase in the risk of having or developing a disease. In some embodiments, the method comprises (a) contacting a test compound with a model cell of any one of the described embodiments; and (b) detecting a change in a readout that is indicative of a reduction or an augmentation of a cell signaling event associated with said mutation in said disease gene, thereby developing said biologically active agent that modulates said cell signaling event associated with said disease gene.

[0417] In one aspect, the invention provides a recombinant polynucleotide comprising a protected guide sequence downstream of a direct repeat sequence, wherein the protected guide sequence when expressed directs sequence-specific binding of a CRISPR complex to a corresponding target sequence present in a eukaryotic cell. In some embodiments, the target sequence is a viral sequence present in a eukaryotic cell. In some embodiments, the target sequence is a proto-oncogene or an oncogene.

[0418] In one aspect the invention provides for a method of selecting one or more cell(s) by introducing one or more mutations in a gene in the one or more cell (s), the method comprising: introducing one or more vectors into the cell (s), wherein the one or more vectors drive expression of one or more of: a Cas13 enzyme, a protected guide RNA comprising a guide sequence, and an editing template; wherein the editing template comprises the one or more mutations that abolish Cas13 enzyme cleavage; allowing non-homologous end joining (NHEJ)-based gene insertion mechanisms of the editing template with the target polynucleotide in the cell(s) to be selected; allowing a CRISPR complex to bind to a target polynucleotide to effect cleavage of the target polynucleotide within said gene, wherein the CRISPR complex comprises the Cas13 enzyme complexed with the protected guide RNA comprising a guide sequence that is hybridized to the target sequence within the target polynucleotide, wherein binding of the CRISPR complex to the target polynucleotide induces cell death, thereby allowing one or more cell(s) in which one or more mutations have been introduced to be selected. In a preferred embodiment of the invention the cell to be selected may be a eukaryotic cell. Aspects of the invention allow for selection of specific cells without requiring a selection marker or a two-step process that may include a counter-selection system.

[0419] With respect to mutations of the Cas13 enzyme, when the enzyme is not FnCas13, mutations may be as described herein elsewhere; conservative substitution for any of the replacement amino acids is also envisaged. In an aspect the invention provides as to any or each or all embodiments herein-discussed wherein the CRISPR enzyme comprises at least one or more, or at least two or more mutations, wherein the at least one or more mutation or the at least two or more mutations are selected from those described herein elsewhere.

[0420] In a further aspect, the invention involves a computer-assisted method for identifying or designing potential compounds to fit within or bind to CRISPR-Cas13 system or a functional portion thereof or vice versa (a computer-assisted method for identifying or designing potential CRISPR-Cas13 systems or a functional portion thereof for binding to desired compounds) or a computer-assisted method for identifying or designing potential CRISPR-Cas13 systems (e.g., with regard to predicting areas of the CRISPR-Cas13 system to be able to be manipulated—for instance, based on crystal structure data or based on data of Cas13 orthologs, or with respect to where a functional group such as an activator or repressor can be attached to the CRISPR-Cas13 system, or as to Cas13 truncations or as to designing nickases), said method comprising:

[0421] using a computer system, e.g., a programmed computer comprising a processor, a data storage system, an input device, and an output device, the steps of:

[0422] (a) inputting into the programmed computer through said input device data comprising the three-dimensional co-ordinates of a subset of the atoms from or pertaining to the CRISPR-Cas13 crystal structure, e.g., in the CRISPR-Cas13 system binding domain or alternatively or additionally in domains that vary based on variance among Cas13 orthologs or as to Cas13s or as to nickases or as to functional groups, optionally with structural information from CRISPR-Cas13 system complex(es), thereby generating a data set;

[0423] (b) comparing, using said processor, said data set to a computer database of structures stored in said computer data storage system, e.g., structures of compounds that bind or putatively bind or that are desired to bind to a CRISPR-Cas13 system or as to Cas13 orthologs (e.g., as Cas13s or as to domains or regions that vary amongst Cas13 orthologs) or as to the CRISPR-Cas13 crystal structure or as to nickases or as to functional groups;

[0424] (c) selecting from said database, using computer methods, structure(s)—e.g., CRISPR-Cas13 structures that may bind to desired structures, desired structures that may bind to certain CRISPR-Cas13 structures, portions of the CRISPR-Cas13 system that may be manipulated, e.g., based on data from other portions of the CRISPR-Cas13 crystal structure and/or from Cas13 orthologs, truncated Cas13s, novel nickases or particular functional groups, or positions for attaching functional groups or functional-group-CRISPR-Cas13 systems;

[0425] (d) constructing, using computer methods, a model of the selected structure(s); and

[0426] (e) outputting to said output device the selected structure(s);

and optionally synthesizing one or more of the selected structure(s);
and further optionally testing said synthesized selected structure(s) as or in a CRISPR-Cas13 system;

[0427] or, said method comprising: providing the co-ordinates of at least two atoms of the CRISPR-Cas13 crystal structure, e.g., at least two atoms of the herein Crystal Structure Table of the CRISPR-Cas13 crystal structure or co-ordinates of at least a sub-domain of the CRISPR-Cas13 crystal structure (“selected co-ordinates”), providing the structure of a candidate comprising a binding molecule or of portions of the CRISPR-Cas13 system that may be manipulated, e.g., based on data from other portions of the CRISPR-Cas13 crystal structure and/or from Cas13 orthologs, or the structure of functional groups, and fitting the structure of the candidate to the selected co-ordinates, to thereby obtain product data comprising CRISPR-Cas13 structures that may bind to desired structures, desired structures that may bind to certain CRISPR-Cas13 structures, portions of the CRISPR-Cas13 system that may be manipulated, truncated Cas13s, novel nickases, or particular functional groups, or positions for attaching functional groups or functional-group-CRISPR-Cas13 systems, with output thereof; and optionally synthesizing compound(s) from said product data and further optionally comprising testing said synthesized compound(s) as or in a CRISPR-Cas13 system.

[0428] The testing can comprise analyzing the CRISPR-Cas13 system resulting from said synthesized selected structure(s), e.g., with respect to binding, or performing a desired function.

[0429] The output in the foregoing methods can comprise data transmission, e.g., transmission of information via telecommunication, telephone, video conference, mass communication, e.g., presentation such as a computer presentation (e.g. POWERPOINT), internet, email, documentary communication such as a computer program (e.g. WORD) document and the like. Accordingly, the invention also comprehends computer readable media containing: atomic co-ordinate data according to the herein-referenced Crystal Structure, said data defining the three dimensional structure of CRISPR-Cas13 or at least one sub-domain thereof, or structure factor data for CRISPR-Cas13, said structure factor data being derivable from the atomic co-ordinate data of herein-referenced Crystal Structure. The computer readable media can also contain any data of the foregoing methods. The invention further comprehends methods a computer system for generating or performing rational design as in the foregoing methods containing either: atomic co-ordinate data according to herein-referenced Crystal Structure, said data defining the three dimensional structure of CRISPR-Cas13 or at least one sub-domain thereof, or structure factor data for CRISPR-Cas13, said structure factor data being derivable from the atomic co-ordinate data of herein-referenced Crystal Structure. The invention further comprehends a method of doing business comprising providing to a user the computer system or the media or the three dimensional structure of CRISPR-Cas13 or at least one sub-domain thereof, or structure factor data for CRISPR-Cas13, said structure set forth in and said structure factor data being derivable from the atomic co-ordinate data of herein-referenced Crystal Structure, or the herein computer media or a herein data transmission.

[0430] A “binding site” or an “active site” comprises or consists essentially of or consists of a site (such as an atom, a functional group of an amino acid residue or a plurality of such atoms and/or groups) in a binding cavity or region, which may bind to a compound such as a nucleic acid molecule, which is/are involved in binding.

[0431] By “fitting”, is meant determining by automatic, or semi-automatic means, interactions between one or more atoms of a candidate molecule and at least one atom of a structure of the invention, and calculating the extent to which such interactions are stable. Interactions include attraction and repulsion, brought about by charge, steric considerations and the like. Various computer-based methods for fitting are described further

[0432] By “root mean square (or rms) deviation”, we mean the square root of the arithmetic mean of the squares of the deviations from the mean.

[0433] By a “computer system”, is meant the hardware means, software means and data storage means used to analyze atomic coordinate data. The minimum hardware means of the computer-based systems of the present invention typically comprises a central processing unit (CPU), input means, output means and data storage means. Desirably a display or monitor is provided to visualize structure data. The data storage means may be RAM or means for accessing computer readable media of the invention. Examples of such systems are computer and tablet devices running Unix, Windows or Apple operating systems.

[0434] By “computer readable media”, is meant any medium or media, which can be read and accessed directly or indirectly by a computer e.g., so that the media is suitable for use in the above-mentioned computer system. Such media include, but are not limited to: magnetic storage media such as floppy discs, hard disc storage medium and magnetic tape; optical storage media such as optical discs or CD-ROM; electrical storage media such as RAM and ROM; thumb drive devices; cloud storage devices and hybrids of these categories such as magnetic/optical storage media.

[0435] The invention comprehends the use of the protected guides described herein above in the optimized functional CRISPR-Cas enzyme systems described herein.

[0436] In some embodiments, the guide RNA is a toehold based guide RNA. The toehold based guide RNAs allows for guide RNAs only becoming activated based on the RNA levels of other transcripts in a cell. In certain embodiments, the guide RNA has an extension that includes a loop and a complementary sequence that fold over onto the guide and block the guide. The loop can be complementary to transcripts or miRNA in the cell and bind these transcripts if present. This will unfold the guide RNA allowing it to bind a Cas13 molecule. This bound complex can then knockdown transcripts or edit transcripts depending on the application.

[0437] Crispr-Cas Enzyme

[0438] In its unmodified form, a CRISPR-Cas protein is a catalytically inactive protein. This implies that upon formation of a nucleic acid-targeting complex (comprising a guide RNA hybridized to a target sequence wherein the RNA in or near (e.g., within 1, 2, 3, 4, 5, 6, 7, 8, 9, 10, 20, 50, or more base pairs from) the target sequence is modified (e.g. cleaved). As used herein the term “sequence(s) associated with a target RNA” refers to sequences near the vicinity of the target sequence (e.g. within 1, 2, 3, 4, 5, 6, 7, 8, 9, 10, 20, 50, or more base pairs from the target sequence, wherein the target sequence is comprised within a target RNA).

[0439] In some embodiments, a CRISPR-Cas protein is considered to substantially lack all DNA cleavage activity when the DNA cleavage activity of the mutated enzyme is about no more than 25%, 10%, 5%, 1%, 0.1%, 0.01%, or less of the RNA cleavage activity of the non-mutated form of the enzyme; an example can be when the RNA cleavage activity of the mutated form is nil or negligible as compared with the non-mutated form. In these embodiments, the CRISPR-Cas protein is used as a generic RNA binding protein. The mutations may be artificially introduced mutations or gain- or loss-of-function mutations.

[0440] In addition to the mutations described above, the CRISPR-Cas protein may be additionally modified. As used herein, the term “modified” with regard to a CRISPR-Cas protein generally refers to a CRISPR-Cas protein having one or more modifications or mutations (including point mutations, truncations, insertions, deletions, chimeras, fusion proteins, etc.) compared to the wild type Cas protein from which it is derived. By derived is meant that the derived enzyme is largely based, in the sense of having a high degree of sequence homology with, a wildtype enzyme, but that it has been mutated (modified) in some way as known in the art or as described herein.

[0441] The additional modifications of the CRISPR-Cas protein may or may not cause an altered functionality. By means of example, and in particular with reference to CRISPR-Cas protein, modifications which do not result in an altered functionality include for instance codon optimization for expression into a particular host, or providing the nuclease with a particular marker (e.g. for visualization). Modifications with may result in altered functionality may also include mutations, including point mutations, insertions, deletions, truncations (including split nucleases), etc. Fusion proteins may without limitation include for instance fusions with heterologous domains or functional domains (e.g. localization signals, catalytic domains, etc.). In certain embodiments, various different modifications may be combined (e.g. a mutated nuclease which is catalytically inactive and which further is fused to a functional domain, such as for instance to induce DNA methylation or another nucleic acid modification, such as including without limitation a break (e.g. by a different nuclease (domain)), a mutation, a deletion, an insertion, a replacement, a ligation, a digestion, a break or a recombination). As used herein, “altered functionality” includes without limitation an altered specificity (e.g. altered target recognition, increased (e.g. “enhanced” Cas proteins) or decreased specificity, or altered PAM recognition), altered activity (e.g. increased or decreased catalytic activity, including catalytically inactive nucleases or nickases), and/or altered stability (e.g. fusions with destalilization domains). Suitable heterologous domains include without limitation a nuclease, a ligase, a repair protein, a methyltransferase, (viral) integrase, a recombinase, a transposase, an argonaute, a cytidine deaminase, a retron, a group II intron, a phosphatase, a phosphorylase, a sulpfurylase, a kinase, a polymerase, an exonuclease, etc. Examples of all these modifications are known in the art. It will be understood that a “modified” nuclease as referred to herein, and in particular a “modified” Cas or “modified” CRISPR-Cas system or complex preferably still has the capacity to interact with or bind to the polynucleic acid (e.g. in complex with theguide molecule). Such modified Cas protein can be combined with the deaminase protein or active domain thereof as described herein.

[0442] In certain embodiments, CRISPR-Cas protein may comprise one or more modifications resulting in enhanced activity and/or specificity, such as including mutating residues that stabilize the targeted or non-targeted strand (e.g. eCas9; “Rationally engineered Cas9 nucleases with improved specificity”, Slaymaker et al. (2016), Science, 351(6268):84-88, incorporated herewith in its entirety by reference). In certain embodiments, the altered or modified activity of the engineered CRISPR protein comprises increased targeting efficiency or decreased off-target binding. In certain embodiments, the altered activity of the engineered CRISPR protein comprises modified cleavage activity. In certain embodiments, the altered activity comprises increased cleavage activity as to the target polynucleotide loci. In certain embodiments, the altered activity comprises decreased cleavage activity as to the target polynucleotide loci. In certain embodiments, the altered activity comprises decreased cleavage activity as to off-target polynucleotide loci. In certain embodiments, the altered or modified activity of the modified nuclease comprises altered helicase kinetics. In certain embodiments, the modified nuclease comprises a modification that alters association of the protein with the nucleic acid molecule comprising RNA (in the case of a Cas protein), or a strand of the target polynucleotide loci, or a strand of off-target polynucleotide loci. In an aspect of the invention, the engineered CRISPR protein comprises a modification that alters formation of the CRISPR complex. In certain embodiments, the altered activity comprises increased cleavage activity as to off-target polynucleotide loci. Accordingly, in certain embodiments, there is increased specificity for target polynucleotide loci as compared to off-target polynucleotide loci. In other embodiments, there is reduced specificity for target polynucleotide loci as compared to off-target polynucleotide loci. In certain embodiments, the mutations result in decreased off-target effects (e.g. cleavage or binding properties, activity, or kinetics), such as in case for Cas proteins for instance resulting in a lower tolerance for mismatches between target and guide RNA. Other mutations may lead to increased off-target effects (e.g. cleavage or binding properties, activity, or kinetics). Other mutations may lead to increased or decreased on-target effects (e.g. cleavage or binding properties, activity, or kinetics). In certain embodiments, the mutations result in altered (e.g. increased or decreased) helicase activity, association or formation of the functional nuclease complex (e.g. CRISPR-Cas complex). In certain embodiments, as described above, the mutations result in an altered PAM recognition, i.e. a different PAM may be (in addition or in the alternative) be recognized, compared to the unmodified Cas protein. Particularly preferred mutations include positively charged residues and/or (evolutionary) conserved residues, such as conserved positively charged residues, in order to enhance specificity. In certain embodiments, such residues may be mutated to uncharged residues, such as alanine.

### Base Excision Repair Inhibitor

[0443] In some embodiments, the CD-functionalized CRISPR system further comprises a base excision repair (BER) inhibitor. Without wishing to be bound by any particular theory, cellular DNA-repair response to the presence of a U:G pairing in DNA may be responsible for a decrease in nucleobase editing efficiency in cells. Uracil DNA glycosylase catalyzes removal of uracil from DNA in cells, which may initiate base excision repair, such that the U:G pair is reversed to C:G. In some embodiments, the BER inhibitor is an uracyl glycosylase inhibitor or an active domain thereof.

[0444] In some embodiments, the BER inhibitor is an inhibitor of uracil DNA glycosylase (UDG). In some embodiments, the BER inhibitor is an inhibitor of human UDG. In some embodiments, the BER inhibitor is a polypeptide inhibitor. In some embodiments, the BER inhibitor is a protein that binds single-stranded DNA. For example, the BER inhibitor may be a Erwinia tasmaniensis single-stranded binding protein. In some embodiments, the BER inhibitor is a protein that binds uracil. In some embodiments, the BER inhibitor is a protein that binds uracil in DNA. In some embodiments, the BER inhibitor is a catalytically inactive UDG or binding domain thereof. In some embodiments, the BER inhibitor is a catalytically inactive UDG or binding domain thereof that does not excise uracil from the DNA. Other proteins that are capable of inhibiting (e.g., sterically blocking) UDG are within the scope of this disclosure. Additionally, any proteins that block or inhibit base-excision repair as also within the scope of this disclosure.

[0445] Without wishing to be bound by any particular theory, base excision repair may be inhibited by molecules that bind the edited strand, block the edited base, inhibit uracil DNA glycosylase, inhibit base excision repair, protect the edited base, and/or promote fixing of the non-targeted strand. Accordingly, the use of the BER inhibitor described herein can increase the editing efficiency of a cytidine deaminase that is capable of catalyzing a C to U change.

[0446] In particular embodiments, the uracil glycosylase inhibitor (UGI) is the uracil DNA glycosylase inhibitor of Bacillus subtilis bacteriophage PBS1 or an active fragment thereof, such as an 83 residue protein of Bacillus subtilis bacteriophage PBS1.

[0447] Suitable UGI protein and nucleotide sequences are provided herein and additional suitable UGI sequences are known to those in the art, and include, for example, those published in Wang et al., Uracil-DNA glycosylase inhibitor gene of bacteriophage PBS2 encodes a binding protein specific for uracil-DNA glycosylase. J. Biol. Chem. 264: 1 163-1 171 (1989); Lundquist et al., Site-directed mutagenesis and characterization of uracil-DNA glycosylase inhibitor protein. Role of specific carboxylic amino acids in complex formation with Escherichia coli uracil-DNA glycosylase. J. Biol. Chem. 272:21408-21419 (1997); Ravishankar et al., X-ray analysis of a complex of Escherichia coli uracil DNA glycosylase (EcUDG) with a proteinaceous inhibitor. The structure elucidation of a prokaryotic UDG. Nucleic Acids Res. 26:4880-4887 (1998); and Putnam et al., Protein mimicry of DNA from crystal structures of the uracil-DNA glycosylase inhibitor protein and its complex with Escherichia coli uracil-DNA glycosylase. J. Mol. Biol. 287:331-346 (1999), the entire contents of each are incorporated herein by reference.

[0448] In some embodiments, the UGI comprises the following amino acid sequence:

[0449] >spβP14739|UNGI_BPPB2 Uracil-DNA glycosylase inhibitor

[0450] MTNLSDIIEKETGKQLVIQESILMLPEEVEEVIGNKPESDILVHTAYDESTDENVM LLTSDAPEYKPWALVIQDSNGENKIKML (SEQ ID NO: 48)

[0451] In some embodiments, the UGI domain comprises a wild-type UGI or a UGI as set forth in SEQ ID NO: 48. In some embodiments, the UGI proteins provided herein include fragments of UGI and proteins homologous to a UGI or a UGI fragment. For example, in some embodiments, a UGI domain comprises a fragment of the amino acid sequence set forth in SEQ ID NO: 48. In some embodiments, a UGI fragment comprises an amino acid sequence that comprises at least 60%, at least 65%, at least 70%, at least 75%, at least 80%, at least 85%, at least 90%, at least 95%, at least 96%, at least 97%, at least 98%, at least 99%, or at least 99.5% of the amino acid sequence as set forth in SEQ ID NO: 48. In some embodiments, a UGI comprises an amino acid sequence homologous to the amino acid sequence set forth in SEQ ID NO: 48 or an amino acid sequence homologous to a fragment of the amino acid sequence set forth in SEQ ID NO: 48. In some embodiments, proteins comprising UGI or fragments of UGI or homologs of UGI or UGI fragments are referred to as “UGI variants.” A UGI variant shares homology to UGI, or a fragment thereof. For example a UGI variant is at least 70% identical, at least 75% identical, at least 80% identical, at least 85% identical, at least 90% identical, at least 95% identical, at least 96% identical, at least 97% identical, at least 98% identical, at least 99% identical, at least 99.5% identical, or at least 99.9% identical to a wild type UGI or a UGI as set forth in SEQ ID NO: 48. In some embodiments, the UGI variant comprises a fragment of UGI, such that the fragment is at least 70% identical, at least 80% identical, at least 90% identical, at least 95% identical, at least 96%) identical, at least 97% identical, at least 98% identical, at least 99% identical, at least 99.5%) identical, or at least 99.9% to the corresponding fragment of wild-type UGI or a UGI as set forth in SEQ ID NO: 48.

[0452] Accordingly, in the first design of the CD-functionalized CRISPR system discussed above, the CRISPR-Cas protein or the cytidine deaminase can be fused to or linked to a BER inhibitor (e.g., an inhibitor of uracyl DNA glycosylase). In some embodiments, the BER inhibitor can be comprised in one of the following structures (nCas13=catalytically inactive Cas13):
[0453] [CD]-[optional linker]-[nCas13]-[optional linker]-[BER inhibitor];
[0454] [CD]-[optional linker]-[BER inhibitor]-[optional linker]-[nCas13];
[0455] [BER inhibitor]-[optional linker]-[CD]-[optional linker]-[nCas13];
[0456] [BER inhibitor]-[optional linker]-[nCas13]-[optional linker]-[CD];
[0457] [nCas13]-[optional linker]-[CD]-[optional linker]-[BER inhibitor];
[0458] [nCas13]-[optional linker]-[BER inhibitor]-[optional linker]-[CD].

[0459] Similarly, in the second design of the CD-functionalized CRISPR system discussed above, the CRISPR-Cas protein, the cytidine deaminase, or the adaptor protein can be fused to or linked to a BER inhibitor (e.g., an inhibitor of uracil DNA glycosylase). In some embodiments, the BER inhibitor can be comprised in one of the following structures (nCas13=catalytically inactive Cas13):
[0460] [nCas13]-[optional linker]-[BER inhibitor];
[0461] [BER inhibitor]-[optional linker]-[nCas13];
[0462] [CD]-[optional linker]-[Adaptor]-[optional linker]-[BER inhibitor];
[0463] [CD]-[optional linker]-[BER inhibitor]-[optional linker]-[Adaptor];
[0464] [BER inhibitor]-[optional linker]-[CD]-[optional linker]-[Adaptor];
[0465] [BER inhibitor]-[optional linker]-[Adaptor]-[optional linker]-[CD];
[0466] [Adaptor]-[optional linker]-[CD]-[optional linker]-[BER inhibitor];
[0467] [Adaptor]-[optional linker]-[BER inhibitor]-[optional linker]-[CD].

[0468] In the third design of the CD-functionalized CRISPR system discussed above, the BER inhibitor can be inserted into an internal loop or unstructured region of a CRISPR-Cas protein.

### Targeting to the Nucleus

[0469] In some embodiments, the methods of the present invention relate to modifying an Adenine in a target locus of interest, whereby the target locus is within a cell. In order to improve targeting of the CRISPR-Cas protein and/or the adenosine deaminase protein or catalytic domain thereof used in the methods of the present invention to the nucleus, it may be advantageous to provide one or both of these components with one or more nuclear localization sequences (NLSs).

[0470] In preferred embodiments, the NLSs used in the context of the present invention are heterologous to the proteins. Non-limiting examples of NLSs include an NLS sequence derived from: the NLS of the SV40 virus large T-antigen, having the amino acid sequence PKKKRKV (SEQ ID NO: 49) or PKKKRKVEAS (SEQ ID NO:50); the NLS from nucleoplasmin (e.g., the nucleoplasmin bipartite NLS with the sequence KRPAATKKAGQAKKKK (SEQ ID NO: 51)); the c-myc NLS having the amino acid sequence PAAKRVKLD (SEQ ID NO: 52) or RQRRNELKRSP (SEQ ID NO: 53); the hRNPA1 M9 NLS having the sequence NQSSNFGPMKGGNFGGRSSGPYGGGGQYFAKPRNQGGY (SEQ ID NO: 54); the sequence RMRIZFKNKGKDTAELRRRRVEVSVELRKAKKDEQILKRRNV (SEQ ID NO: 55) of the IBB domain from importin-alpha; the sequences VSRKRPRP (SEQ ID NO:56) and PPKKARED (SEQ ID NO: 57) of the myoma T protein; the sequence PQPKKKPL (SEQ ID NO: 58) of human p53; the sequence SALIKKKKKMAP (SEQ ID NO:59) of mouse c-abl IV; the sequences DRLRR (SEQ ID NO: 60) and PKQKKRK (SEQ ID NO: 61) of the influenza virus NS1; the sequence RKLKKKIKKL (SEQ ID NO: 62) of the Hepatitis virus delta antigen; the sequence REKKKFLKRR (SEQ ID NO: 63) of the mouse M×1 protein; the sequence KRKGDEVDGVDEVAKKKSKK (SEQ ID NO: 64) of the human poly(ADP-ribose) polymerase; and the sequence RKCLQAGMNLEARKTKK (SEQ ID NO: 65) of the steroid hormone receptors (human) glucocorticoid. In general, the one or more NLSs are of sufficient strength to drive accumulation of the DNA-targeting Cas protein in a detectable amount in the nucleus of a eukaryotic cell. In general, strength of nuclear localization activity may derive from the number of NLSs in the CRISPR-Cas protein, the particular NLS(s) used, or a combination of these factors. Detection of accumulation in the nucleus may be performed by any suitable technique. For example, a detectable marker may be fused to the nucleic acid-targeting protein, such that location within a cell may be visualized, such as in combination with a means for detecting the location of the nucleus (e.g., a stain specific for the nucleus such as DAPI). Cell nuclei may also be isolated from cells, the contents of which may then be analyzed by any suitable process for detecting protein, such as immunohistochemistry, Western blot, or enzyme activity assay. Accumulation in the nucleus may also be determined indirectly, such as by an assay for the effect of nucleic acid-targeting complex formation (e.g., assay for deaminase activity) at the target sequence, or assay for altered gene expression activity affected by DNA-targeting complex formation and/or DNA-targeting), as compared to a control not exposed to the CRISPR-Cas protein and deaminase protein, or exposed to a CRISPR-Cas and/or deaminase protein lacking the one or more NLSs.

[0471] The CRISPR-Cas and/or adenosine deaminase proteins may be provided with 1 or more, such as with, 2, 3, 4, 5, 6, 7, 8, 9, 10, or more heterologous NLSs. In some embodiments, the proteins comprises about or more than about 1, 2, 3, 4, 5, 6, 7, 8, 9, 10, or more NLSs at or near the amino-terminus, about or more than about 1, 2, 3, 4, 5, 6, 7, 8, 9, 10, or more NLSs at or near the carboxy-terminus, or a combination of these (e.g., zero or at least one or more NLS at the amino-terminus and zero or at one or more NLS at the carboxy terminus). When more than one NLS is present, each may be selected independently of the others, such that a single NLS may be present in more than one copy and/or in combination with one or more other NLSs present in one or more copies. In some embodiments, an NLS is considered near the N- or C-terminus when the nearest amino acid of the NLS is within about 1, 2, 3, 4, 5, 10, 15, 20, 25, 30, 40, 50, or more amino acids along the polypeptide chain from the N- or C-terminus. In preferred embodiments of the CRISPR-Cas proteins, an NLS attached to the C-terminal of the protein.

[0472] In certain embodiments of the methods provided herein, the CRISPR-Cas protein and the deaminase protein are delivered to the cell or expressed within the cell as separate proteins. In these embodiments, each of the CRISPR-Cas and deaminase protein can be provided with one or more NLSs as described herein. In certain embodiments, the CRISPR-Cas and deaminase proteins are delivered to the cell or expressed with the cell as a fusion protein. In these embodiments one or both of the CRISPR-Cas and deaminase protein is provided with one or more NLSs. Where the adenosine deaminase is fused to an adaptor protein (such as MS2) as described above, the one or more NLS can be provided on the adaptor protein, provided that this does not interfere with aptamer binding. In particular embodiments, the one or more NLS sequences may also function as linker sequences between the adenosine deaminase and the CRISPR-Cas protein.

[0473] In certain embodiments, guides of the invention comprise specific binding sites (e.g. aptamers) for adapter proteins, which may be linked to or fused to an adenosine deaminase or catalytic domain thereof. When such a guides forms a CRISPR complex (i.e. CRISPR-Cas protein binding to guide and target) the adapter proteins bind and, the adenosine deaminase or catalytic domain thereof associated with the adapter protein is positioned in a spatial orientation which is advantageous for the attributed function to be effective.

[0474] The skilled person will understand that modifications to the guide which allow for binding of the adapter+adenosine deaminase, but not proper positioning of the adapter+adenosine deaminase (e.g. due to steric hindrance within the three dimensional structure of the CRISPR complex) are modifications which are not intended. The one or more modified guide may be modified at the tetra loop, the stem loop 1, stem loop 2, or stem loop 3, as described herein, preferably at either the tetra loop or stem loop 2, and most preferably at both the tetra loop and stem loop 2.

### Use of Orthogonal Catalytically Inactive CRISPR-Cas Proteins

[0475] In particular embodiments, the Cas13 nickase is used in combination with an orthogonal catalytically inactive CRISPR-Cas protein to increase efficiency of said Cas13 nickase (as described in Chen et al. 2017, Nature Communications 8:14958; doi:10.1038/ncomms14958). More particularly, the orthogonal catalytically inactive CRISPR-Cas protein is characterized by a different PAM recognition site than the Cas13 nickase used in the AD-functionalized CRISPR system and the corresponding guide sequence is selected to bind to a target sequence proximal to that of the Cas13 nickase of the AD-functionalized CRISPR system. The orthogonal catalytically inactive CRISPR-Cas protein as used in the context of the present invention does not form part of the AD-functionalized CRISPR system but merely functions to increase the efficiency of said Cas13 nickase and is used in combination with a standard guide molecule as described in the art for said CRISPR-Cas protein. In particular embodiments, said orthogonal catalytically inactive CRISPR-Cas protein is a dead CRISPR-Cas protein, i.e. comprising one or more mutations which abolishes the nuclease activity of said CRISPR-Cas protein. In particular embodiments, the catalytically inactive orthogonal CRISPR-Cas protein is provided with two or more guide molecules which are capable of hybridizing to target sequences which are proximal to the target sequence of the Cas13 nickase. In particular embodiments, at least two guide molecules are used to target said catalytically inactive CRISPR-Cas protein, of which at least one guide molecule is capable of hybridizing to a target sequence 5″ of the target sequence of the Cas13 nickase and at least one guide molecule is capable of hybridizing to a target sequence 3′ of the target sequence of the Cas13 nickase of the AD-functionalized CRISPR system, whereby said one or more target sequences may be on the same or the opposite DNA strand as the target sequence of the Cas13 nickase. In particular embodiments, the guide sequences for the one or more guide molecules of the orthogonal catalytically inactive CRISPR-Cas protein are selected such that the target sequences are proximal to that of the guide molecule for the targeting of the AD-functionalized CRISPR, i.e. for the targeting of the Cas13 nickase. In particular embodiments, the one or more target sequences of the orthogonal catalytically inactive CRISPR-Cas enzyme are each separated from the target sequence of the Cas13 nickase by more than 5 but less than 450 basepairs. Optimal distances between the target sequences of the guides for use with the orthogonal catalytically inactive CRISPR-Cas protein and the target sequence of the AD-functionalized CRISPR system can be determined by the skilled person. In particular embodiments, the orthogonal CRISPR-Cas protein is a Class II, type II CRISPR protein. In particular embodiments, the orthogonal CRISPR-Cas protein is a Class II, type V CRISPR protein. In particular embodiments, the catalytically inactive orthogonal CRISPR-Cas protein. In particular embodiments, the catalytically inactive orthogonal CRISPR-Cas protein has been modified to alter its PAM specificity as described elsewhere herein. In particular embodiments, the Cas13 protein nickase is a nickase which, by itself has limited activity in human cells, but which, in combination with an inactive orthogonal CRISPR-Cas protein and one or more corresponding proximal guides ensures the required nickase activity.

### CRISPR Development and Use

[0476] The present invention may be further illustrated and extended based on aspects of CRISPR-Cas development and use as set forth in the following articles and particularly as relates to delivery of a CRISPR protein complex and uses of an RNA guided endonuclease in cells and organisms:
[0477] Multiplex genome engineering using CRISPR-Cas systems. Cong, L., Ran, F. A., Cox, D., Lin, S., Barretto, R., Habib, N., Hsu, P. D., Wu, X., Jiang, W., Marraffini, L. A., & Zhang, F. Science February 15; 339(6121):819-23 (2013);
[0478] RNA-guided editing of bacterial genomes using CRISPR-Cas systems. Jiang W., Bikard D., Cox D., Zhang F, Marraffini L A. Nat Biotechnol March; 31(3):233-9 (2013);
[0479] One-Step Generation of Mice Carrying Mutations in Multiple Genes by CRISPR-Cas-Mediated Genome Engineering. Wang H., Yang H., Shivalila C S., Dawlaty M M., Cheng A W., Zhang F., Jaenisch R. Cell May 9; 153(4):910-8 (2013);
[0480] Optical control of mammalian endogenous transcription and epigenetic states. Konermann S, Brigham M D, Trevino A E, Hsu P D, Heidenreich M, Cong L, Platt R J, Scott D A, Church G M, Zhang F. Nature. August 22; 500(7463):472-6. doi: 10.1038/Nature12466. Epub 2013 Aug. 23 (2013);
[0481] Double Nicking by RNA-Guided CRISPR Cas9 for Enhanced Genome Editing Specificity. Ran, F A., Hsu, P D., Lin, C Y., Gootenberg, J S., Konermann, S., Trevino, A E., Scott, D A., Inoue, A., Matoba, S., Zhang, Y., & Zhang, F. Cell August 28. pii: S0092-8674 (13)01015-5 (2013-A);
[0482] DNA targeting specificity of RNA-guided Cas9 nucleases. Hsu, P., Scott, D., Weinstein, J., Ran, F A., Konermann, S., Agarwala, V., Li, Y., Fine, E., Wu, X., Shalem, O., Cradick, T J., Marraffini, L A., Bao, G., & Zhang, F. Nat Biotechnol doi:10.1038/nbt.2647 (2013);
[0483] Genome engineering using the CRISPR-Cas9 system. Ran, F A., Hsu, P D., Wright, J., Agarwala, V., Scott, D A., Zhang, F. Nature Protocols November; 8(11):2281-308 (2013-B);
[0484] Genome-Scale CRISPR-Cas9 Knockout Screening in Human Cells. Shalem, O., Sanjana, N E., Hartenian, E., Shi, X., Scott, D A., Mikkelson, T., Heckl, D., Ebert, B L., Root, D E., Doench, J G., Zhang, F. Science December 12. (2013);
[0485] Crystal structure of cas9 in complex with guide RNA and target DNA. Nishimasu, H., Ran, F A., Hsu, P D., Konermann, S., Shehata, S I., Dohmae, N., Ishitani, R., Zhang, F., Nureki, O. Cell February 27, 156(5):935-49 (2014);
[0486] Genome-wide binding of the CRISPR endonuclease Cas9 in mammalian cells. Wu X., Scott D A., Kriz A J., Chiu A C., Hsu P D., Dadon D B., Cheng A W., Trevino A E., Konermann S., Chen S., Jaenisch R., Zhang F., Sharp P A. Nat Biotechnol. April 20. doi: 10.1038/nbt.2889 (2014);
[0487] CRISPR-Cas9 Knockin Mice for Genome Editing and Cancer Modeling. Platt R J, Chen S, Zhou Y, Yim M J, Swiech L, Kempton H R, Dahlman J E, Parnas O, Eisenhaure T M, Jovanovic M, Graham D B, Jhunjhunwala S, Heidenreich M, Xavier R J, Langer R, Anderson D G, Hacohen N, Regev A, Feng G, Sharp P A, Zhang F. Cell 159(2): 440-455 DOI: 10.1016/j.cell.2014.09.014 (2014);
[0488] Development and Applications of CRISPR-Cas9 for Genome Engineering, Hsu P D, Lander E S, Zhang F., Cell. June 5; 157(6):1262-78 (2014).
[0489] Genetic screens in human cells using the CRISPR-Cas9 system, Wang T, Wei J J, Sabatini D M, Lander E S., Science. January 3; 343(6166): 80-84. doi:10.1126/science.1246981 (2014);
[0490] Rational design of highly active sgRNAs for CRISPR-Cas9-mediated gene inactivation, Doench J G, Hartenian E, Graham D B, Tothova Z, Hegde M, Smith I, Sullender M, Ebert B L, Xavier R J, Root D E., (published online 3 Sep. 2014) Nat Biotechnol. December; 32(12):1262-7 (2014);
[0491] In vivo interrogation of gene function in the mammalian brain using CRISPR-Cas9, Swiech L, Heidenreich M, Banerjee A, Habib N, Li Y, Trombetta J, Sur M, Zhang F., (published online 19 Oct. 2014) Nat Biotechnol. January; 33(1):102-6 (2015);
[0492] Genome-scale transcriptional activation by an engineered CRISPR-Cas9 complex, Konermann S, Brigham M D, Trevino A E, Joung J, Abudayyeh O O, Barcena C, Hsu P D, Habib N, Gootenberg J S, Nishimasu H, Nureki O, Zhang F., Nature. January 29; 517(7536):583-8 (2015).
[0493] A split-Cas9 architecture for inducible genome editing and transcription modulation, Zetsche B, Volz S E, Zhang F., (published online 2 Feb. 2015) Nat Biotechnol. February; 33(2):139-42 (2015);
[0494] Genome-wide CRISPR Screen in a Mouse Model of Tumor Growth and Metastasis, Chen S, Sanjana N E, Zheng K, Shalem O, Lee K, Shi X, Scott D A, Song J, Pan J Q, Weissleder R, Lee H, Zhang F, Sharp P A. Cell 160, 1246-1260, Mar. 12, 2015 (multiplex screen in mouse), and
[0495] In vivo genome editing using Staphylococcus aureus Cas9, Ran F A, Cong L, Yan W X, Scott D A, Gootenberg J S, Kriz A J, Zetsche B, Shalem O, Wu X, Makarova K S, Koonin E V, Sharp P A, Zhang F., (published online 1 Apr. 2015), Nature. April 9; 520(7546):186-91 (2015).
[0496] Shalem et al., “High-throughput functional genomics using CRISPR-Cas9,” Nature Reviews Genetics 16, 299-311 (May 2015).
[0497] Xu et al., “Sequence determinants of improved CRISPR sgRNA design,” Genome Research 25, 1147-1157 (August 2015).
[0498] Parnas et al., “A Genome-wide CRISPR Screen in Primary Immune Cells to Dissect Regulatory Networks,” Cell 162, 675-686 (Jul. 30, 2015).
[0499] Ramanan et al., CRISPR-Cas9 cleavage of viral DNA efficiently suppresses hepatitis B virus,” Scientific Reports 5:10833. doi: 10.1038/srep10833 (Jun. 2, 2015)
[0500] Nishimasu et al., Crystal Structure of Staphylococcus aureus Cas9,” Cell 162, 1113-1126 (Aug. 27, 2015)
[0501] BCL11A enhancer dissection by Cas9-mediated in situ saturating mutagenesis, Canver et al., Nature 527(7577):192-7 (Nov. 12, 2015) doi: 10.1038/nature15521. Epub 2015 Sep. 16.
[0502] Cpf1 Is a Single RNA-Guided Endonuclease of a Class 2 CRISPR-Cas System, Zetsche et al., Cell 163, 759-71 (Sep. 25, 2015).
[0503] Discovery and Functional Characterization of Diverse Class 2 CRISPR-Cas Systems, Shmakov et al., Molecular Cell, 60(3), 385-397 doi: 10.1016/j.molcel.2015.10.008 Epub Oct. 22, 2015.
[0504] Rationally engineered Cas9 nucleases with improved specificity, Slaymaker et al., Science 2016 Jan. 1 351(6268): 84-88 doi: 10.1126/science.aad5227. Epub 2015 Dec. 1.
[0505] Gao et al, “Engineered Cpf1 Enzymes with Altered PAM Specificities,” bioRxiv 091611; doi: http://dx.doi.org/10.1101/091611 (Dec. 4, 2016).
   each of which is incorporated herein by reference, may be considered in the practice of the instant invention, and discussed briefly below:
[0506] Cong et al. engineered type II CRISPR-Cas systems for use in eukaryotic cells based on both Streptococcus thermophilus Cas9 and also Streptococcus pyogenes Cas9 and demonstrated that Cas9 nucleases can be directed by short RNAs to induce precise cleavage of DNA in human and mouse cells. Their study further showed that Cas9 as converted into a nicking enzyme can be used to facilitate homology-directed repair in eukaryotic cells with minimal mutagenic activity. Additionally, their study demonstrated that multiple guide sequences can be encoded into a single CRISPR array to enable simultaneous editing of several at endogenous genomic loci sites within the mammalian genome, demonstrating easy programmability and wide applicability of the RNA-guided nuclease technology. This ability to use RNA to program sequence specific DNA cleavage in cells defined a new class of genome engineering tools. These studies further showed that other CRISPR loci are likely to be transplantable into mammalian cells and can also mediate mammalian genome cleavage. Importantly, it can be envisaged that several aspects of the CRISPR-Cas system can be further improved to increase its efficiency and versatility.
[0507] Jiang et al. used the clustered, regularly interspaced, short palindromic repeats (CRISPR)-associated Cas9 endonuclease complexed with dual-RNAs to introduce precise mutations in the genomes of Streptococcus pneumoniae and Escherichia coli. The approach relied on dual-RNA: Cas9-directed cleavage at the targeted genomic site to kill unmutated cells and circumvents the need for selectable markers or counter-selection systems. The study reported reprogramming dual-RNA:Cas9 specificity by changing the sequence of short CRISPR RNA (crRNA) to make single- and multinucleotide changes carried on editing templates. The study showed that simultaneous use of two crRNAs enabled multiplex mutagenesis. Furthermore, when the approach was used in combination with recombineering, in S. pneumoniae, nearly 100% of cells that were recovered using the described approach contained the desired mutation, and in E. coli, 65% that were recovered contained the mutation.
[0508] Wang et al. (2013) used the CRISPR-Cas system for the one-step generation of mice carrying mutations in multiple genes which were traditionally generated in multiple steps by sequential recombination in embryonic stem cells and/or time-consuming intercrossing of mice with a single mutation. The CRISPR-Cas system will greatly accelerate the in vivo study of functionally redundant genes and of epistatic gene interactions.
[0509] Konermann et al. (2013) addressed the need in the art for versatile and robust technologies that enable optical and chemical modulation of DNA-binding domains based CRISPR Cas9 enzyme and also Transcriptional Activator Like Effectors
[0510] Ran et al. (2013-A) described an approach that combined a Cas9 nickase mutant with paired guide RNAs to introduce targeted double-strand breaks. This addresses the issue of the Cas9 nuclease from the microbial CRISPR-Cas system being targeted to specific genomic loci by a guide sequence, which can tolerate certain mismatches to the DNA target and thereby promote undesired off-target mutagenesis. Because individual nicks in the genome are repaired with high fidelity, simultaneous nicking via appropriately offset guide RNAs is required for double-stranded breaks and extends the number of specifically recognized bases for target cleavage. The authors demonstrated that using paired nicking can reduce off-target activity by 50- to 1,500-fold in cell lines and to facilitate gene knockout in mouse zygotes without sacrificing on-target cleavage efficiency. This versatile strategy enables a wide variety of genome editing applications that require high specificity.
[0511] Hsu et al. (2013) characterized SpCas9 targeting specificity in human cells to inform the selection of target sites and avoid off-target effects. The study evaluated >700 guide RNA variants and SpCas9-induced indel mutation levels at >100 predicted genomic off-target loci in 293T and 293FT cells. The authors that SpCas9 tolerates mismatches between guide RNA and target DNA at different positions in a sequence-dependent manner, sensitive to the number, position and distribution of mismatches. The authors further showed that SpCas9-mediated cleavage is unaffected by DNA methylation and that the dosage of SpCas9 and guide RNA can be titrated to minimize off-target modification. Additionally, to facilitate mammalian genome engineering applications, the authors reported providing a web-based software tool to guide the selection and validation of target sequences as well as off-target analyses.
[0512] Ran et al. (2013-B) described a set of tools for Cas9-mediated genome editing via non-homologous end joining (NHEJ) or homology-directed repair (HDR) in mammalian cells, as well as generation of modified cell lines for downstream functional studies. To minimize off-target cleavage, the authors further described a double-nicking strategy using the Cas9 nickase mutant with paired guide RNAs. The protocol provided by the authors experimentally derived guidelines for the selection of target sites, evaluation of cleavage efficiency and analysis of off-target activity. The studies showed that beginning with target design, gene modifications can be achieved within as little as 1-2 weeks, and modified clonal cell lines can be derived within 2-3 weeks.
[0513] Shalem et al. described a new way to interrogate gene function on a genome-wide scale. Their studies showed that delivery of a genome-scale CRISPR-Cas9 knockout (GeCKO) library targeted 18,080 genes with 64,751 unique guide sequences enabled both negative and positive selection screening in human cells. First, the authors showed use of the GeCKO library to identify genes essential for cell viability in cancer and pluripotent stem cells. Next, in a melanoma model, the authors screened for genes whose loss is involved in resistance to vemurafenib, a therapeutic that inhibits mutant protein kinase BRAF. Their studies showed that the highest-ranking candidates included previously validated genes NF1 and MED12 as well as novel hits NF2, CUL3, TADA2B, and TADA1. The authors observed a high level of consistency between independent guide RNAs targeting the same gene and a high rate of hit confirmation, and thus demonstrated the promise of genome-scale screening with Cas9.
[0514] Nishimasu et al. reported the crystal structure of Streptococcus pyogenes Cas9 in complex with sgRNA and its target DNA at 2.5 A° resolution. The structure revealed a bilobed architecture composed of target recognition and nuclease lobes, accommodating the sgRNA:DNA heteroduplex in a positively charged groove at their interface. Whereas the recognition lobe is essential for binding sgRNA and DNA, the nuclease lobe contains the HNH and RuvC nuclease domains, which are properly positioned for cleavage of the complementary and non-complementary strands of the target DNA, respectively. The nuclease lobe also contains a carboxyl-terminal domain responsible for the interaction with the protospacer adjacent motif (PAM). This high-resolution structure and accompanying functional analyses have revealed the molecular mechanism of RNA-guided DNA targeting by Cas9, thus paving the way for the rational design of new, versatile genome-editing technologies.
[0515] Wu et al. mapped genome-wide binding sites of a catalytically inactive Cas9 (dCas9) from Streptococcus pyogenes loaded with single guide RNAs (sgRNAs) in mouse embryonic stem cells (mESCs). The authors showed that each of the four sgRNAs tested targets dCas9 to between tens and thousands of genomic sites, frequently characterized by a 5-nucleotide seed region in the sgRNA and an NGG protospacer adjacent motif (PAM). Chromatin inaccessibility decreases dCas9 binding to other sites with matching seed sequences; thus 70% of off-target sites are associated with genes. The authors showed that targeted sequencing of 295 dCas9 binding sites in mESCs transfected with catalytically active Cas9 identified only one site mutated above background levels. The authors proposed a two-state model for Cas9 binding and cleavage, in which a seed match triggers binding but extensive pairing with target DNA is required for cleavage.
[0516] Platt et al. established a Cre-dependent Cas9 knockin mouse. The authors demonstrated in vivo as well as ex vivo genome editing using adeno-associated virus (AAV)-, lentivirus-, or particle-mediated delivery of guide RNA in neurons, immune cells, and endothelial cells.
[0517] Hsu et al. (2014) is a review article that discusses generally CRISPR-Cas9 history from yogurt to genome editing, including genetic screening of cells.
[0518] Wang et al. (2014) relates to a pooled, loss-of-function genetic screening approach suitable for both positive and negative selection that uses a genome-scale lentiviral single guide RNA (sgRNA) library.
[0519] Doench et al. created a pool of sgRNAs, tiling across all possible target sites of a panel of six endogenous mouse and three endogenous human genes and quantitatively assessed their ability to produce null alleles of their target gene by antibody staining and flow cytometry. The authors showed that optimization of the PAM improved activity and also provided an on-line tool for designing sgRNAs.
[0520] Swiech et al. demonstrate that AAV-mediated SpCas9 genome editing can enable reverse genetic studies of gene function in the brain.
[0521] Konermann et al. (2015) discusses the ability to attach multiple effector domains, e.g., transcriptional activator, functional and epigenomic regulators at appropriate positions on the guide such as stem or tetraloop with and without linkers.
[0522] Zetsche et al. demonstrates that the Cas9 enzyme can be split into two and hence the assembly of Cas9 for activation can be controlled.
[0523] Chen et al. relates to multiplex screening by demonstrating that a genome-wide in vivo CRISPR-Cas9 screen in mice reveals genes regulating lung metastasis.
[0524] Ran et al. (2015) relates to SaCas9 and its ability to edit genomes and demonstrates that one cannot extrapolate from biochemical assays.
[0525] Shalem et al. (2015) described ways in which catalytically inactive Cas9 (dCas9) fusions are used to synthetically repress (CRISPRi) or activate (CRISPRa) expression, showing. advances using Cas9 for genome-scale screens, including arrayed and pooled screens, knockout approaches that inactivate genomic loci and strategies that modulate transcriptional activity.
[0526] Xu et al. (2015) assessed the DNA sequence features that contribute to single guide RNA (sgRNA) efficiency in CRISPR-based screens. The authors explored efficiency of CRISPR-Cas9 knockout and nucleotide preference at the cleavage site. The authors also found that the sequence preference for CRISPRi/a is substantially different from that for CRISPR-Cas9 knockout.
[0527] Parnas et al. (2015) introduced genome-wide pooled CRISPR-Cas9 libraries into dendritic cells (DCs) to identify genes that control the induction of tumor necrosis factor (Tnf) by bacterial lipopolysaccharide (LPS). Known regulators of Tlr4 signaling and previously unknown candidates were identified and classified into three functional modules with distinct effects on the canonical responses to LPS.
[0528] Ramanan et al (2015) demonstrated cleavage of viral episomal DNA (cccDNA) in infected cells. The HBV genome exists in the nuclei of infected hepatocytes as a 3.2 kb double-stranded episomal DNA species called covalently closed circular DNA (cccDNA), which is a key component in the HBV life cycle whose replication is not inhibited by current therapies. The authors showed that sgRNAs specifically targeting highly conserved regions of HBV robustly suppresses viral replication and depleted cccDNA.
[0529] Nishimasu et al. (2015) reported the crystal structures of SaCas9 in complex with a single guide RNA (sgRNA) and its double-stranded DNA targets, containing the 5′-TTGAAT-3′ PAM and the 5′-TTGGGT-3′ PAM. A structural comparison of SaCas9 with SpCas9 highlighted both structural conservation and divergence, explaining their distinct PAM specificities and orthologous sgRNA recognition.
[0530] Canver et al. (2015) demonstrated a CRISPR-Cas9-based functional investigation of non-coding genomic elements. The authors we developed pooled CRISPR-Cas9 guide RNA libraries to perform in situ saturating mutagenesis of the human and mouse BCL11A enhancers which revealed critical features of the enhancers.
[0531] Zetsche et al. (2015) reported characterization of Cpf1, a class 2 CRISPR nuclease from Francisella novicida U112 having features distinct from Cas9. Cpf1 is a single RNA-guided endonuclease lacking tracrRNA, utilizes a T-rich protospacer-adjacent motif, and cleaves DNA via a staggered DNA double-stranded break.
[0532] Shmakov et al. (2015) reported three distinct Class 2 CRISPR-Cas systems. Two system CRISPR enzymes (C2c1 and C2c3) contain RuvC-like endonuclease domains distantly related to Cpf1. Unlike Cpf1, C2c1 depends on both crRNA and tracrRNA for DNA cleavage. The third enzyme (C2c2) contains two predicted HEPN RNase domains and is tracrRNA independent.
[0533] Slaymaker et al (2016) reported the use of structure-guided protein engineering to improve the specificity of Streptococcus pyogenes Cas9 (SpCas9). The authors developed “enhanced specificity” SpCas9 (eSpCas9) variants which maintained robust on-target cleavage with reduced off-target effects.

[0534] The methods and tools provided herein are exemplified for Cas13, a type II nuclease that does not make use of tracrRNA. Orthologs of Cas13 have been identified in different bacterial species as described herein. Further type II nucleases with similar properties can be identified using methods described in the art (Shmakov et al. 2015, 60:385-397; Abudayeh et al. 2016, Science, 5; 353(6299)). In particular embodiments, such methods for identifying novel CRISPR effector proteins may comprise the steps of selecting sequences from the database encoding a seed which identifies the presence of a CRISPR Cas locus, identifying loci located within 10 kb of the seed comprising Open Reading Frames (ORFs) in the selected sequences, selecting therefrom loci comprising ORFs of which only a single ORF encodes a novel CRISPR effector having greater than 700 amino acids and no more than 90% homology to a known CRISPR effector. In particular embodiments, the seed is a protein that is common to the CRISPR-Cas system, such as Cas1. In further embodiments, the CRISPR array is used as a seed to identify new effector proteins.

[0535] Also, “Dimeric CRISPR RNA-guided Fok1 nucleases for highly specific genome editing”, Shengdar Q. Tsai, Nicolas Wyvekens, Cyd Khayter, Jennifer A. Foden, Vishal Thapar, Deepak Reyon, Mathew J. Goodwin, Martin J. Aryee, J. Keith Joung Nature Biotechnology 32(6): 569-77 (2014), relates to dimeric RNA-guided Fold Nucleases that recognize extended sequences and can edit endogenous genes with high efficiencies in human cells.

[0536] With respect to general information on CRISPR/Cas Systems, components thereof, and delivery of such components, including methods, materials, delivery vehicles, vectors, particles, and making and using thereof, including as to amounts and formulations, as well as CRISPR-Cas-expressing eukaryotic cells, CRISPR-Cas expressing eukaryotes, such as a mouse, reference is made to: U.S. Pat. Nos. 8,999,641, 8,993,233, 8,697,359, 8,771,945, 8,795,965, 8,865,406, 8,871,445, 8,889,356, 8,889,418, 8,895,308, 8,906,616, 8,932,814, and 8,945,839; US Patent Publications US 2014-0310830 (U.S. application Ser. No. 14/105,031), US 2014-0287938 A1 (U.S. application Ser. No. 14/213,991), US 2014-0273234 A1 (U.S. application Ser. No. 14/293,674), US2014-0273232 A1 (U.S. application Ser. No. 14/290,575), US 2014-0273231 (U.S. application Ser. No. 14/259,420), US 2014-0256046 A1 (U.S. application Ser. No. 14/226,274), US 2014-0248702 A1 (U.S. application Ser. No. 14/258,458), US 2014-0242700 A1 (U.S. application Ser. No. 14/222,930), US 2014-0242699 A1 (U.S. application Ser. No. 14/183,512), US 2014-0242664 A1 (U.S. application Ser. No. 14/104,990), US 2014-0234972 A1 (U.S. application Ser. No. 14/183,471), US 2014-0227787 A1 (U.S. application Ser. No. 14/256,912), US 2014-0189896 A1 (U.S. application Ser. No. 14/105,035), US 2014-0186958 (U.S. application Ser. No. 14/105,017), US 2014-0186919 A1 (U.S. application Ser. No. 14/104,977), US 2014-0186843 A1 (U.S. application Ser. No. 14/104,900), US 2014-0179770 A1 (U.S. application Ser. No. 14/104,837) and US 2014-0179006 A1 (U.S. application Ser. No. 14/183,486), US 2014-0170753 (U.S. application Ser. No. 14/183,429); US 2015-0184139 (U.S. application Ser. No. 14/324,960); Ser. No. 14/054,414 European Patent Applications EP 2 771 468 (EP13818570.7), EP 2 764 103 (EP13824232.6), and EP 2 784 162 (EP14170383.5); and PCT Patent Publications WO2014/093661 (PCT/US2013/074743), WO2014/093694 (PCT/US2013/074790), WO2014/093595 (PCT/US2013/074611), WO2014/093718 (PCT/US2013/074825), WO2014/093709 (PCT/US2013/074812), WO2014/093622 (PCT/US2013/074667), WO2014/093635 (PCT/US2013/074691), WO2014/093655 (PCT/US2013/074736), WO2014/093712 (PCT/US2013/074819), WO2014/093701 (PCT/US2013/074800), WO2014/018423 (PCT/US2013/051418), WO2014/204723 (PCT/US2014/041790), WO2014/204724 (PCT/US2014/041800), WO2014/204725 (PCT/US2014/041803), WO2014/204726 (PCT/US2014/041804), WO2014/204727 (PCT/US2014/041806), WO2014/204728 (PCT/US2014/041808), WO2014/204729 (PCT/US2014/041809), WO2015/089351 (PCT/US2014/069897), WO2015/089354 (PCT/US2014/069902), WO2015/089364 (PCT/US2014/069925), WO2015/089427 (PCT/US2014/070068), WO2015/089462 (PCT/US2014/070127), WO2015/089419 (PCT/US2014/070057), WO2015/089465 (PCT/US2014/070135), WO2015/089486 (PCT/US2014/070175), WO2015/058052 (PCT/US2014/061077), WO2015/070083 (PCT/US2014/064663), WO2015/089354 (PCT/US2014/069902), WO2015/089351 (PCT/US2014/069897), WO2015/089364 (PCT/US2014/069925), WO2015/089427 (PCT/US2014/070068), WO2015/089473 (PCT/US2014/070152), WO2015/089486 (PCT/US2014/070175), WO2016/049258 (PCT/US2015/051830), WO2016/094867 (PCT/US2015/065385), WO2016/094872 (PCT/US2015/065393), WO2016/094874 (PCT/US2015/065396), WO2016/106244 (PCT/US2015/067177).

[0537] Mention is also made of U.S. application 62/180,709, 17 Jun. 2015, PROTECTED GUIDE RNAS (PGRNAS); U.S. application 62/091,455, filed, 12 Dec. 2014, PROTECTED GUIDE RNAS (PGRNAS); U.S. application 62/096,708, 24 Dec. 2014, PROTECTED GUIDE RNAS (PGRNAS); U.S. applications 62/091,462, 12 Dec. 2014, 62/096,324, 23 Dec. 2014, 62/180,681, 17 Jun. 2015, and 62/237,496, 5 Oct. 2015, DEAD GUIDES FOR CRISPR TRANSCRIPTION FACTORS; U.S. application 62/091,456, 12 Dec. 2014 and 62/180,692, 17 Jun. 2015, ESCORTED AND FUNCTIONALIZED GUIDES FOR CRISPR-CAS SYSTEMS; U.S. application 62/091,461, 12Dec. 2014, DELIVERY, USE AND THERAPEUTIC APPLICATIONS OF THE CRISPR-CAS SYSTEMS AND COMPOSITIONS FOR GENOME EDITING AS TO HEMATOPOETIC STEM CELLS (HSCs); U.S. application 62/094,903, 19 Dec. 2014, UNBIASED IDENTIFICATION OF DOUBLE-STRAND BREAKS AND GENOMIC REARRANGEMENT BY GENOME-WISE INSERT CAPTURE SEQUENCING; U.S. application 62/096,761, 24 Dec. 2014, ENGINEERING OF SYSTEMS, METHODS AND OPTIMIZED ENZYME AND GUIDE SCAFFOLDS FOR SEQUENCE MANIPULATION; U.S. application 62/098,059, 30 Dec. 2014, 62/181,641, 18 Jun. 2015, and 62/181,667, 18 Jun. 2015, RNA-TARGETING SYSTEM; U.S. application 62/096,656, 24 Dec. 2014 and 62/181,151, 17 Jun. 2015, CRISPR HAVING OR ASSOCIATED WITH DESTABILIZATION DOMAINS; U.S. application 62/096,697, 24 Dec. 2014, CRISPR HAVING OR ASSOCIATED WITH AAV; U.S. application 62/098,158, 30 Dec. 2014, ENGINEERED CRISPR COMPLEX INSERTIONAL TARGETING SYSTEMS; U.S. application 62/151,052, 22 Apr. 2015, CELLULAR TARGETING FOR EXTRACELLULAR EXOSOMAL REPORTING; U.S. application 62/054,490, 24 Sep. 2014, DELIVERY, USE AND THERAPEUTIC APPLICATIONS OF THE CRISPR-CAS SYSTEMS AND COMPOSITIONS FOR TARGETING DISORDERS AND DISEASES USING PARTICLE DELIVERY COMPONENTS; U.S. application 61/939,154, 12 Feb. 2014, SYSTEMS, METHODS AND COMPOSITIONS FOR SEQUENCE MANIPULATION WITH OPTIMIZED FUNCTIONAL CRISPR-CAS SYSTEMS; U.S. application 62/055,484, 25 Sep. 2014, SYSTEMS, METHODS AND COMPOSITIONS FOR SEQUENCE MANIPULATION WITH OPTIMIZED FUNCTIONAL CRISPR-CAS SYSTEMS; U.S. application 62/087,537, 4 Dec. 2014, SYSTEMS, METHODS AND COMPOSITIONS FOR SEQUENCE MANIPULATION WITH OPTIMIZED FUNCTIONAL CRISPR-CAS SYSTEMS; U.S. application 62/054,651, 24 Sep. 2014, DELIVERY, USE AND THERAPEUTIC APPLICATIONS OF THE CRISPR-CAS SYSTEMS AND COMPOSITIONS FOR MODELING COMPETITION OF MULTIPLE CANCER MUTATIONS IN VIVO; U.S. application 62/067,886, 23 Oct. 2014, DELIVERY, USE AND THERAPEUTIC APPLICATIONS OF THE CRISPR-CAS SYSTEMS AND COMPOSITIONS FOR MODELING COMPETITION OF MULTIPLE CANCER MUTATIONS IN VIVO; U.S. applications 62/054,675, 24 Sep. 2014 and 62/181,002, 17 Jun. 2015, DELIVERY, USE AND THERAPEUTIC APPLICATIONS OF THE CRISPR-CAS SYSTEMS AND COMPOSITIONS IN NEURONAL CELLS/TISSUES; U.S. application 62/054,528, 24 Sep. 2014, DELIVERY, USE AND THERAPEUTIC APPLICATIONS OF THE CRISPR-CAS SYSTEMS AND COMPOSITIONS IN IMMUNE DISEASES OR DISORDERS; U.S. application 62/055,454, 25 Sep. 2014, DELIVERY, USE AND THERAPEUTIC APPLICATIONS OF THE CRISPR-CAS SYSTEMS AND COMPOSITIONS FOR TARGETING DISORDERS AND DISEASES USING CELL PENETRATION PEPTIDES (CPP); U.S. application 62/055,460, 25 Sep. 2014, MULTIFUNCTIONAL-CRISPR COMPLEXES AND/OR OPTIMIZED ENZYME LINKED FUNCTIONAL-CRISPR COMPLEXES; U.S. application 62/087,475, 4 Dec. 2014 and 62/181,690, 18 Jun. 2015, FUNCTIONAL SCREENING WITH OPTIMIZED FUNCTIONAL CRISPR-CAS SYSTEMS; U.S. application 62/055,487, 25Sep. 2014, FUNCTIONAL SCREENING WITH OPTIMIZED FUNCTIONAL CRISPR-CAS SYSTEMS; U.S. application 62/087,546, 4 Dec. 2014 and 62/181,687, 18 Jun. 2015, MULTIFUNCTIONAL CRISPR COMPLEXES AND/OR OPTIMIZED ENZYME LINKED FUNCTIONAL-CRISPR COMPLEXES; and U.S. application 62/098,285, 30 Dec. 2014, CRISPR MEDIATED IN VIVO MODELING AND GENETIC SCREENING OF TUMOR GROWTH AND METASTASIS.

[0538] Mention is made of U.S. applications 62/181,659, 18 Jun. 2015 and 62/207,318, 19 Aug. 2015, ENGINEERING AND OPTIMIZATION OF SYSTEMS, METHODS, ENZYME AND GUIDE SCAFFOLDS OF CAS9 ORTHOLOGS AND VARIANTS FOR SEQUENCE MANIPULATION. Mention is made of U.S. applications 62/181,663, 18 Jun. 2015 and 62/245,264, 22 Oct. 2015, NOVEL CRISPR ENZYMES AND SYSTEMS, U.S. applications 62/181,675, 18 Jun. 2015, 62/285,349, 22 Oct. 2015, 62/296,522, 17 Feb. 2016, and 62/320,231, 8 Apr. 2016, NOVEL CRISPR ENZYMES AND SYSTEMS, U.S. application 62/232,067, 24 Sep. 2015, U.S. application Ser. No. 14/975,085, 18 Dec. 2015, European application No. 16150428.7, U.S. application 62/205,733, 16 Aug. 2015, U.S. application 62/201,542, 5 Aug. 2015, U.S. application 62/193,507, 16 Jul. 2015, and U.S. application 62/181,739, 18 Jun. 2015, each entitled NOVEL CRISPR ENZYMES AND SYSTEMS and of U.S. application 62/245,270, 22 Oct. 2015, NOVEL CRISPR ENZYMES AND SYSTEMS. Mention is also made of U.S. application 61/939,256, 12 Feb. 2014, and WO 2015/089473 (PCT/US2014/070152), 12 Dec. 2014, each entitled ENGINEERING OF SYSTEMS, METHODS AND OPTIMIZED GUIDE COMPOSITIONS WITH NEW ARCHITECTURES FOR SEQUENCE MANIPULATION. Mention is also made of PCT/US2015/045504, 15 Aug. 2015, U.S. application 62/180,699, 17 Jun. 2015, and U.S. application 62/038,358, 17 Aug. 2014, each entitled GENOME EDITING USING CAS9 NICKASES.

[0539] Each of these patents, patent publications, and applications, and all documents cited therein or during their prosecution (“appin cited documents”) and all documents cited or referenced in the appin cited documents, together with any instructions, descriptions, product specifications, and product sheets for any products mentioned therein or in any document therein and incorporated by reference herein, are hereby incorporated herein by reference, and may be employed in the practice of the invention. All documents (e.g., these patents, patent publications and applications and the appin cited documents) are incorporated herein by reference to the same extent as if each individual document was specifically and individually indicated to be incorporated by reference.

### Type-VI CRISPR-Cas Protein

[0540] The application describes methods using Type-VI CRISPR-Cas proteins. This is exemplified herein with Cas13a, Cas13b, and Cas13c, whereby a number of orthologs or homologs have been identified. It will be apparent to the skilled person that further orthologs or homologs can be identified and that any of the functionalities described herein may be engineered into other orthologs, including chimeric enzymes comprising fragments from multiple orthologs.

[0541] Computational methods of identifying novel CRISPR-Cas loci are described in EP3009511 or US2016208243 and may comprise the following steps: detecting all contigs encoding the Cas1 protein; identifying all predicted protein coding genes within 20 kB of the cas1 gene; comparing the identified genes with Cas protein-specific profiles and predicting CRISPR arrays; selecting unclassified candidate CRISPR-Cas loci containing proteins larger than 500 amino acids (>500 aa); analyzing selected candidates using methods such as PSI-BLAST and HHPred to screen for known protein domains, thereby identifying novel Class 2 CRISPR-Cas loci (see also Schmakov et al. 2015, Mol Cell. 60(3):385-97). In addition to the above mentioned steps, additional analysis of the candidates may be conducted by searching metagenomics databases for additional homologs. Additionally or alternatively, to expand the search to non-autonomous CRISPR-Cas systems, the same procedure can be performed with the CRISPR array used as the seed.

[0542] In one aspect the detecting all contigs encoding the Cas1 protein is performed by GenemarkS which a gene prediction program as further described in “GeneMarkS: a self-training method for prediction of gene starts in microbial genomes. Implications for finding sequence motifs in regulatory regions.” John Besemer, Alexandre Lomsadze and Mark Borodovsky, Nucleic Acids Research (2001) 29, pp 2607-2618, herein incorporated by reference.

[0543] In one aspect the identifying all predicted protein coding genes is carried out by comparing the identified genes with Cas protein-specific profiles and annotating them according to NCBI Conserved Domain Database (CDD) which is a protein annotation resource that consists of a collection of well-annotated multiple sequence alignment models for ancient domains and full-length proteins. These are available as position-specific score matrices (PSSMs) for fast identification of conserved domains in protein sequences via RPS-BLAST. CDD content includes NCBI-curated domains, which use 3D-structure information to explicitly define domain boundaries and provide insights into sequence/structure/function relationships, as well as domain models imported from a number of external source databases (Pfam, SMART, COG, PRK, TIGRFAM). In a further aspect, CRISPR arrays were predicted using a PILER-CR program which is a public domain software for finding CRISPR repeats as described in “PILER-CR: fast and accurate identification of CRISPR repeats”, Edgar, R. C., BMC Bioinformatics, January 20; 8:18 (2007), herein incorporated by reference.

[0544] In a further aspect, the case by case analysis is performed using PSI-BLAST (Position-Specific Iterative Basic Local Alignment Search Tool). PSI-BLAST derives a position-specific scoring matrix (PS SM) or profile from the multiple sequence alignment of sequences detected above a given score threshold using protein-protein BLAST. This PSSM is used to further search the database for new matches, and is updated for subsequent iterations with these newly detected sequences. Thus, PSI-BLAST provides a means of detecting distant relationships between proteins.

[0545] In another aspect, the case by case analysis is performed using HHpred, a method for sequence database searching and structure prediction that is as easy to use as BLAST or PSI-BLAST and that is at the same time much more sensitive in finding remote homologs. In fact, HHpred's sensitivity is competitive with the most powerful servers for structure prediction currently available. HHpred is the first server that is based on the pairwise comparison of profile hidden Markov models (HMMs). Whereas most conventional sequence search methods search sequence databases such as UniProt or the NR, HHpred searches alignment databases, like Pfam or SMART. This greatly simplifies the list of hits to a number of sequence families instead of a clutter of single sequences. All major publicly available profile and alignment databases are available through HHpred. HHpred accepts a single query sequence or a multiple alignment as input. Within only a few minutes it returns the search results in an easy-to-read format similar to that of PSI-BLAST. Search options include local or global alignment and scoring secondary structure similarity. HHpred can produce pairwise query-template sequence alignments, merged query-template multiple alignments (e.g. for transitive searches), as well as 3D structural models calculated by the MODELLER software from HHpred alignments.

### Codon Optimized Nucleic Acid Sequences

[0546] Where the effector protein is to be administered as a nucleic acid, the application envisages the use of codon-optimized CRISPR-Cas type VI protein, and more particularly Cas13-encoding nucleic acid sequences (and optionally protein sequences). An example of a codon optimized sequence, is in this instance a sequence optimized for expression in a eukaryote, e.g., humans (i.e. being optimized for expression in humans), or for another eukaryote, animal or mammal as herein discussed; see, e.g., SaCas9 human codon optimized sequence in WO 2014/093622 (PCT/US2013/074667) as an example of a codon optimized sequence (from knowledge in the art and this disclosure, codon optimizing coding nucleic acid molecule(s), especially as to effector protein (e.g., Cas13) is within the ambit of the skilled artisan). Whilst this is preferred, it will be appreciated that other examples are possible and codon optimization for a host species other than human, or for codon optimization for specific organs is known. In some embodiments, an enzyme coding sequence encoding a RNA-targeting Cas protein is codon optimized for expression in particular cells, such as eukaryotic cells. The eukaryotic cells may be those of or derived from a particular organism, such as a plant or a mammal, including but not limited to human, or non-human eukaryote or animal or mammal as herein discussed, e.g., mouse, rat, rabbit, dog, livestock, or non-human mammal or primate. In some embodiments, processes for modifying the germ line genetic identity of human beings and/or processes for modifying the genetic identity of animals which are likely to cause them suffering without any substantial medical benefit to man or animal, and also animals resulting from such processes, may be excluded. In general, codon optimization refers to a process of modifying a nucleic acid sequence for enhanced expression in the host cells of interest by replacing at least one codon (e.g., about or more than about 1, 2, 3, 4, 5, 10, 15, 20, 25, 50, or more codons) of the native sequence with codons that are more frequently or most frequently used in the genes of that host cell while maintaining the native amino acid sequence. Various species exhibit particular bias for certain codons of a particular amino acid. Codon bias (differences in codon usage between organisms) often correlates with the efficiency of translation of messenger RNA (mRNA), which is in turn believed to be dependent on, among other things, the properties of the codons being translated and the availability of particular transfer RNA (tRNA) molecules. The predominance of selected tRNAs in a cell is generally a reflection of the codons used most frequently in peptide synthesis. Accordingly, genes can be tailored for optimal gene expression in a given organism based on codon optimization. Codon usage tables are readily available, for example, at the “Codon Usage Database” available at www.kazusa.orjp/codon/ and these tables can be adapted in a number of ways. See Nakamura, Y., et al. “Codon usage tabulated from the international DNA sequence databases: status for the year 2000” Nucl. Acids Res. 28:292 (2000). Computer algorithms for codon optimizing a particular sequence for expression in a particular host cell are also available, such as Gene Forge (Aptagen; Jacobus, Pa.), are also available. In some embodiments, one or more codons (e.g., 1, 2, 3, 4, 5, 10, 15, 20, 25, 50, or more, or all codons) in a sequence encoding a RNA-targeting Cas protein corresponds to the most frequently used codon for a particular amino acid. As to codon usage in yeast, reference is made to the online Yeast Genome database available at http://www.yeastgenome.org/community/codon_usage.shtml, or Codon selection in yeast, Bennetzen and Hall, J Biol Chem. 1982 Mar. 25; 257(6):3026-31. As to codon usage in plants including algae, reference is made to Codon usage in higher plants, green algae, and cyanobacteria, Campbell and Gowri, Plant Physiol. 1990 January; 92(1): 1-11.; as well as Codon usage in plant genes, Murray et al, Nucleic Acids Res. 1989 Jan. 25; 17(2):477-98; or Selection on the codon bias of chloroplast and cyanelle genes in different plant and algal lineages, Morton B R, J Mol Evol. 1998 April; 46(4):449-59.

### Orthologs of Cas13

[0547] The terms “orthologue” (also referred to as “ortholog” herein) and “homologue” (also referred to as “homolog” herein) are well known in the art. By means of further guidance, a “homologue” of a protein as used herein is a protein of the same species which performs the same or a similar function as the protein it is a homologue of Homologous proteins may but need not be structurally related, or are only partially structurally related. An “orthologue” of a protein as used herein is a protein of a different species which performs the same or a similar function as the protein it is an orthologue of. Orthologous proteins may but need not be structurally related, or are only partially structurally related. Homologs and orthologs may be identified by homology modelling (see, e.g., Greer, Science vol. 228 (1985) 1055, and Blundell et al. Eur J Biochem vol 172 (1988), 513) or “structural BLAST” (Dey F, Cliff Zhang Q, Petrey D, Honig B. Toward a “structural BLAST”: using structural relationships to infer function. Protein Sci. 2013 April; 22(4):359-66. doi: 10.1002/pro.2225.). See also Shmakov et al. (2015) for application in the field of CRISPR-Cas loci. Homologous proteins may but need not be structurally related, or are only partially structurally related.

[0548] The Cas13 gene is found in several diverse bacterial genomes, typically in the same locus with cas1, cas2, and cas4 genes and a CRISPR cassette (for example, FNFX1_1431-FNFX1_1428 of Francisella cf. novicida Fx1). Thus, the layout of this putative novel CRISPR-Cas system appears to be similar to that of type II-B. Furthermore, similar to Cas9, the Cas13 protein contains a readily identifiable C-terminal region that is homologous to the transposon ORF-B and includes an active RuvC-like nuclease, an arginine-rich region, and a Zn finger (absent in Cas9). However, unlike Cas9, Cas13 is also present in several genomes without a CRISPR-Cas context and its relatively high similarity with ORF-B suggests that it might be a transposon component. It was suggested that if this was a genuine CRISPR-Cas system and Cas13 is a functional analog of Cas9 it would be a novel CRISPR-Cas type, namely type V (See Annotation and Classification of CRISPR-Cas Systems. Makarova K S, Koonin E V. Methods Mol Biol. 2015; 1311:47-75). However, as described herein, Cas13 is denoted to be in subtype V-A to distinguish it from C2c1p which does not have an identical domain structure and is hence denoted to be in subtype V-B.

[0549] The present invention encompasses the use of a Cas13 effector protein, derived from a Cas13 locus denoted as subtype V-A. Herein such effector proteins are also referred to as “Cas13p”, e.g., a Cas13 protein (and such effector protein or Cas13 protein or protein derived from a Cas13 locus is also called “CRISPR-Cas protein”).

[0550] In particular embodiments, the effector protein is a Cas13 effector protein from an organism from a genus comprising Streptococcus, Campylobacter, Nitratifractor, Staphylococcus, Parvibaculum, Roseburia, Neisseria, Gluconacetobacter, Azospirillum, Sphaerochaeta, Lactobacillus, Eubacterium, Corynebacter, Carnobacterium, Rhodobacter, Listeria, Paludibacter, Clostridium, Lachnospiraceae, Clostridiaridium, Leptotrichia, Francisella, Legionella, Alicyclobacillus, Methanomethyophilus, Porphyromonas, Prevotella, Bacteroidetes, Helcococcus, Leptospira, Desulfovibrio, Desulfonatronum, Opitutaceae, Tuberibacillus, Bacillus, Brevibacilus, Methylobacterium, Butyvibrio, Perigrinibacterium, Pareubacterium, Moraxella, Thiomicrospira or Acidaminococcus. In particular embodiments, the Cas13 effector protein is selected from an organism from a genus selected from Eubacterium, Lachnospiraceae, Leptotrichia, Francisella, Methanomethyophilus, Porphyromonas, Prevotella, Leptospira, Butyvibrio, Perigrinibacterium, Pareubacterium, Moraxella, Thiomicrospira or Acidaminococcus

[0551] In further particular embodiments, the Cas13 effector protein is from an organism selected from S. mutans, S. agalactiae, S. equisimilis, S. sanguinis, S. pneumonia; C. jejuni, C. coli; N. salsuginis, N. tergarcus; S. auricularis, S. carnosus; N. meningitides, N gonorrhoeae; L. monocytogenes, L. ivanovii; C. botulinum, C. difficile, C. tetani, C. sordellii, L inadai, F. tularensis 1, P. albensis, L. bacterium, B. proteoclasticus, P. bacterium, P. crevioricanis, P. disiens and P. macacae.

[0552] The effector protein may comprise a chimeric effector protein comprising a first fragment from a first effector protein (e.g., a Cas13) ortholog and a second fragment from a second effector (e.g., a Cas13) protein ortholog, and wherein the first and second effector protein orthologs are different. At least one of the first and second effector protein (e.g., a Cas13) orthologs may comprise an effector protein (e.g., a Cas13) from an organism comprising Streptococcus, Campylobacter, Nitratifractor, Staphylococcus, Parvibaculum, Roseburia, Neisseria, Gluconacetobacter, Azospirillum, Sphaerochaeta, Lactobacillus, Eubacterium, Corynebacter, Carnobacterium, Rhodobacter, Listeria, Paludibacter, Clostridium, Lachnospiraceae, Clostridiaridium, Leptotrichia, Francisella, Legionella, Alicyclobacillus, Methanomethyophilus, Porphyromonas, Prevotella, Bacteroidetes, Helcococcus, Letospira, Desulfovibrio, Desulfonatronum, Opitutaceae, Tuberibacillus, Bacillus, Brevibacilus, Methylobacterium, Butyvibrio, Perigrinibacterium, Pareubacterium, Moraxella, Thiomicrospira or Acidaminococcus; e.g., a chimeric effector protein comprising a first fragment and a second fragment wherein each of the first and second fragments is selected from a Cas13 of an organism comprising Streptococcus, Campylobacter, Nitratifractor, Staphylococcus, Parvibaculum, Roseburia, Neisseria, Gluconacetobacter, Azospirillum, Sphaerochaeta, Lactobacillus, Eubacterium, Corynebacter, Carnobacterium, Rhodobacter, Listeria, Paludibacter, Clostridium, Lachnospiraceae, Clostridiaridium, Leptotrichia, Francisella, Legionella, Alicyclobacillus, Methanomethyophilus, Porphyromonas, Prevotella, Bacteroidetes, Helcococcus, Letospira, Desulfovibrio, Desulfonatronum, Opitutaceae, Tuberibacillus, Bacillus, Brevibacilus, Methylobacterium, Butyvibrio, Perigrinibacterium, Pareubacterium, Moraxella, Thiomicrospira or Acidaminococcus wherein the first and second fragments are not from the same bacteria; for instance a chimeric effector protein comprising a first fragment and a second fragment wherein each of the first and second fragments is selected from a Cas13 of S. mutans, S. agalactiae, S. equisimilis, S. sanguinis, S. pneumonia; C. jejuni, C. coli; N. salsuginis, N. tergarcus; S. auricularis, S. carnosus; N. meningitides, N gonorrhoeae; L. monocytogenes, L. ivanovii; C. botulinum, C. difficile, C. tetani, C. sordellii; Francisella tularensis 1, Prevotella albensis, Lachnospiraceae bacterium MC20171, Butyrivibrio proteoclasticus, Peregrinibacteria bacterium GW2011_GWA2_33_10, Parcubacteria bacterium GW2011_GWC2_44_17, Smithella sp. SCADC, Acidaminococcus sp. BV3L6, Lachnospiraceae bacterium MA2020, Candidatus Methanoplasma termitum, Eubacterium eligens, Moraxella bovoculi 237, Leptospira inadai, Lachnospiraceae bacterium ND2006, Porphyromonas crevioricanis 3, Prevotella disiens and Porphyromonas macacae, wherein the first and second fragments are not from the same bacteria.

[0553] In a more preferred embodiment, the Cas13p is derived from a bacterial species selected from Francisella tularensis 1, Prevotella albensis, Lachnospiraceae bacterium MC2017 1, Butyrivibrio proteoclasticus, Peregrinibacteria bacterium GW2011_GWA2_33_10, Parcubacteria bacterium GW2011_GWC2_44_17, Smithella sp. SCADC, Acidaminococcus sp. BV3L6, Lachnospiraceae bacterium MA2020, Candidatus Methanoplasma termitum, Eubacterium eligens, Moraxella bovoculi 237, Moraxella bovoculi AAX08_00205, Moraxella bovoculi AAX11_00205, Butyrivibrio sp. NC3005, Thiomicrospira sp. XS5, Leptospira inadai, Lachnospiraceae bacterium ND2006, Porphyromonas crevioricanis 3, Prevotella disiens and Porphyromonas macacae. In certain embodiments, the Cas13p is derived from a bacterial species selected from Acidaminococcus sp. BV3L6, Lachnospiraceae bacterium MA2020. In certain embodiments, the effector protein is derived from a subspecies of Francisella tularensis 1, including but not limited to Francisella tularensis subsp. Novicida. In certain preferred embodiments, the Cas13p is derived from a bacterial species selected from Acidaminococcus sp. BV3L6, Lachnospiraceae bacterium ND2006, Lachnospiraceae bacterium MA2020, Moraxella bovoculi AAX08_00205, Moraxella bovoculi AAX11_00205, Butyrivibrio sp. NC3005, or Thiomicrospira sp. XS5.

[0554] In particular embodiments, the homologue or orthologue of Cas13 as referred to herein has a sequence homology or identity of at least 80%, more preferably at least 85%, even more preferably at least 90%, such as for instance at least 95% with the example Cas13 proteins disclosed herein. In further embodiments, the homologue or orthologue of Cas13 as referred to herein has a sequence identity of at least 80%, more preferably at least 85%, even more preferably at least 90%, such as for instance at least 95% with the wild type Cas13. Where the Cas13 has one or more mutations (mutated), the homologue or orthologue of said Cas13 as referred to herein has a sequence identity of at least 80%, more preferably at least 85%, even more preferably at least 90%, such as for instance at least 95% with the mutated Cas13.

[0555] In an embodiment, the Cas13 protein may be an ortholog of an organism of a genus which includes, but is not limited to Acidaminococcus sp, Lachnospiraceae bacterium or Moraxella bovoculi; in particular embodiments, the type V Cas protein may be an ortholog of an organism of a species which includes, but is not limited to Acidaminococcus sp. BV3L6; Lachnospiraceae bacterium ND2006 (LbCas13) or Moraxella bovoculi 237. In particular embodiments, the homologue or orthologue of Cas13 as referred to herein has a sequence homology or identity of at least 80%, more preferably at least 85%, even more preferably at least 90%, such as for instance at least 95% with one or more of the Cas13 sequences disclosed herein. In further embodiments, the homologue or orthologue of Cas13 as referred to herein has a sequence identity of at least 80%, more preferably at least 85%, even more preferably at least 90%, such as for instance at least 95% with the wild type FnCas13, AsCas13 or LbCas13.

[0556] In particular embodiments, the Cas13 protein of the invention has a sequence homology or identity of at least 60%, more particularly at least 70, such as at least 80%, more preferably at least 85%, even more preferably at least 90%, such as for instance at least 95% with FnCas13, AsCas13 or LbCas13. In further embodiments, the Cas13 protein as referred to herein has a sequence identity of at least 60%, such as at least 70%, more particularly at least 80%, more preferably at least 85%, even more preferably at least 90%, such as for instance at least 95% with the wild type AsCas13 or LbCas13. In particular embodiments, the Cas13 protein of the present invention has less than 60% sequence identity with FnCas13. The skilled person will understand that this includes truncated forms of the Cas13 protein whereby the sequence identity is determined over the length of the truncated form. In particular embodiments, the Cas13 enzyme is not FnCas13.

### Modified Cas13 Enzymes

[0557] In particular embodiments, it is of interest to make use of an engineered Cas13 protein as defined herein, such as Cas13, wherein the protein complexes with a nucleic acid molecule comprising RNA to form a CRISPR complex, wherein when in the CRISPR complex, the nucleic acid molecule targets one or more target polynucleotide loci, the protein comprises at least one modification compared to unmodified Cas13 protein, and wherein the CRISPR complex comprising the modified protein has altered activity as compared to the complex comprising the unmodified Cas13 protein. It is to be understood that when referring herein to CRISPR “protein”, the Cas13 protein preferably is a modified CRISPR-Cas protein (e.g. having increased or decreased (or no) enzymatic activity, such as without limitation including Cas13. The term “CRISPR protein” may be used interchangeably with “CRISPR-Cas protein”, irrespective of whether the CRISPR protein has altered, such as increased or decreased (or no) enzymatic activity, compared to the wild type CRISPR protein.

[0558] Computational analysis of the primary structure of Cas13 nucleases reveals three distinct regions. First a C-terminal RuvC like domain, which is the only functional characterized domain. Second a N-terminal alpha-helical region and thirst a mixed alpha and beta region, located between the RuvC like domain and the alpha-helical region.

[0559] Several small stretches of unstructured regions are predicted within the Cas13 primary structure. Unstructured regions, which are exposed to the solvent and not conserved within different Cas13 orthologs, are preferred sides for splits and insertions of small protein sequences. In addition, these sides can be used to generate chimeric proteins between Cas13 orthologs.

[0560] Based on the above information, mutants can be generated which lead to inactivation of the enzyme or which modify the double strand nuclease to nickase activity. In alternative embodiments, this information is used to develop enzymes with reduced off-target effects (described elsewhere herein)

[0561] In certain of the above-described Cas13 enzymes, the enzyme is modified by mutation of one or more residues (in the RuvC domain) including but not limited to positions R909, R912, R930, R947, K949, R951, R955, K965, K968, K1000, K1002, R1003, K1009, K1017, K1022, K1029, K1035, K1054, K1072, K1086, R1094, K1095, K1109, K1118, K1142, K1150, K1158, K1159, R1220, R1226, R1242, and/or R1252 with reference to amino acid position numbering of AsCas13 (Acidaminococcus sp. BV3L6). In certain embodiments, the Cas13 enzymes comprising said one or more mutations have modified, more preferably increased specificity for the target.

[0562] In certain of the above-described non-naturally-occurring CRISPR-Cas proteins, the enzyme is modified by mutation of one or more residues (in the RAD50) domain including but not limited positions K324, K335, K337, R331, K369, K370, R386, R392, R393, K400, K404, K406, K408, K414, K429, K436, K438, K459, K460, K464, R670, K675, R681, K686, K689, R699, K705, R725, K729, K739, K748, and/or K752 with reference to amino acid position numbering of AsCas13 (Acidaminococcus sp. BV3L6). In certain embodiments, the Cas13 enzymes comprising said one or more mutations have modified, more preferably increased specificity for the target.

[0563] In certain of the Cas13 enzymes, the enzyme is modified by mutation of one or more residues including but not limited positions R912, T923, R947, K949, R951, R955, K965, K968, K1000, R1003, K1009, K1017, K1022, K1029, K1072, K1086, F1103, R1226, and/or R1252 with reference to amino acid position numbering of AsCas13 (Acidaminococcus sp. BV3L6). In certain embodiments, the Cas13 enzymes comprising said one or more mutations have modified, more preferably increased specificity for the target.

[0564] In certain embodiments, the Cas13 enzyme is modified by mutation of one or more residues including but not limited positions R833, R836, K847, K879, K881, R883, R887, K897, K900, K932, R935, K940, K948, K953, K960, K984, K1003, K1017, R1033, R1138, R1165, and/or R1252 with reference to amino acid position numbering of LbCas13 (Lachnospiraceae bacterium ND2006). In certain embodiments, the Cas13 enzymes comprising said one or more mutations have modified, more preferably increased specificity for the target.

[0565] In certain embodiments, the Cas13 enzyme is modified by mutation of one or more residues including but not limited positions K15, R18, K26, Q34, R43, K48, K51, R56, R84, K85, K87, N93, R103, N104, T118, K123, K134, R176, K177, R192, K200, K226, K273, K275, T291, R301, K307, K369, 5404, V409, K414, K436, K438, K468, D482, K516, R518, K524, K530, K532, K548, K559, K570, R574, K592, D596, K603, K607, K613, C647, R681, K686, H720, K739, K748, K757, T766, K780, R790, P791, K796, K809, K815, T816, K860, R862, R863, K868, K897, R909, R912, T923, R947, K949, R951, R955, K965, K968, K1000, R1003, K1009, K1017, K1022, K1029, A1053, K1072, K1086, F1103, 51209, R1226, R1252, K1273, K1282, and/or K1288 with reference to amino acid position numbering of AsCas13 (Acidaminococcus sp. BV3L6). In certain embodiments, the Cas13 enzymes comprising said one or more mutations have modified, more preferably increased specificity for the target.

[0566] In certain embodiments, the enzyme is modified by mutation of one or more residues including but not limited positions K15, R18, K26, R34, R43, K48, K51, K56, K87, K88, D90, K96, K106, K107, K120, Q125, K143, R186, K187, R202, K210, K235, K296, K298, K314, K320, K326, K397, K444, K449, E454, A483, E491, K527, K541, K581, R583, K589, K595, K597, K613, K624, K635, K639, K656, K660, K667, K671, K677, K719, K725, K730, K763, K782, K791, R800, K809, K823, R833, K834, K839, K852, K858, K859, K869, K871, R872, K877, K905, R918, R921, K932, 1960, K962, R964, R968, K978, K981, K1013, R1016, K1021, K1029, K1034, K1041, K1065, K1084, and/or K1098 with reference to amino acid position numbering of FnCas13 (Francisella novicida U112). In certain embodiments, the Cas13 enzymes comprising said one or more mutations have modified, more preferably increased specificity for the target.

[0567] In certain embodiments, the enzyme is modified by mutation of one or more residues including but not limited positions K15, R18, K26, K34, R43, K48, K51, R56, K83, K84, R86, K92, R102, K103, K116, K121, R158, E159, R174, R182, K206, K251, K253, K269, K271, K278, P342, K380, R385, K390, K415, K421, K457, K471, A506, R508, K514, K520, K522, K538, Y548, K560, K564, K580, K584, K591, K595, K601, K634, K640, R645, K679, K689, K707, T716, K725, R737, R747, R748, K753, K768, K774, K775, K785, K787, R788, Q793, K821, R833, R836, K847, K879, K881, R883, R887, K897, K900, K932, R935, K940, K948, K953, K960, K984, K1003, K1017, R1033, K1121, R1138, R1165, K1190, K1199, and/or K1208 with reference to amino acid position numbering of LbCas13 (Lachnospiraceae bacterium ND2006). In certain embodiments, the Cas13 enzymes comprising said one or more mutations have modified, more preferably increased specificity for the target.

[0568] In certain embodiments, the enzyme is modified by mutation of one or more residues including but not limited positions K14, R17, R25, K33, M42, Q47, K50, D55, K85, N86, K88, K94, R104, K105, K118, K123, K131, R174, K175, R190, R198, I221, K267, Q269, K285, K291, K297, K357, K403, K409, K414, K448, K460, K501, K515, K550, R552, K558, K564, K566, K582, K593, K604, K608, K623, K627, K633, K637, E643, K780, Y787, K792, K830, Q846, K858, K867, K876, K890, R900, K901, M906, K921, K927, K928, K937, K939, R940, K945, Q975, R987, R990, K1001, R1034, 11036, R1038, R1042, K1052, K1055, K1087, R1090, K1095, N1103, K1108, K1115, K1139, K1158, R1172, K1188, K1276, R1293, A1319, K1340, K1349, and/or K1356 with reference to amino acid position numbering of MbCas13 (Moraxella bovoculi 237). In certain embodiments, the Cas13 enzymes comprising said one or more mutations have modified, more preferably increased specificity for the target.

[0569] In one embodiment, the Cas13 protein is modified with a mutation at 51228 (e.g., S1228A) with reference to amino acid position numbering of AsCas13. See Yamano et al., Cell 165:949-962 (2016), which is incorporated herein by reference in its entirety.

[0570] In certain embodiments, the Cas13 protein has been modified to recognize a non-natural PAM, such as recognizing a PAM having a sequence or comprising a sequence YCN, YCV, AYV, TYV, RYN, RCN, TGYV, NTTN, TTN, TRTN, TYTV, TYCT, TYCN, TRTN, NTTN, TACT, TYCC, TRTC, TATV, NTTV, TTV, TSTG, TVTS, TYYS, TCYS, TBYS, TCYS, TNYS, TYYS, TNTN, TSTG, TTCC, TCCC, TATC, TGTG, TCTG, TYCV, or TCTC. In particular embodiments, said mutated Cas13 comprises one or more mutated amino acid residue at position 11, 12, 13, 14, 15, 16, 17, 34, 36, 39, 40, 43, 46, 47, 50, 54, 57, 58, 111, 126, 127, 128, 129, 130, 131, 132, 133, 134, 135, 136, 157, 158, 159, 160, 161, 162, 163, 164, 165, 166, 167, 168, 169, 170, 171, 172, 173, 174, 175, 176, 177, 178, 532, 533, 534, 535, 536, 537, 538, 539, 540, 541, 542, 543, 544, 545, 546, 547, 548, 549, 550, 551, 552, 553, 554, 555, 556, 565, 566, 567, 568, 569, 570, 571, 572, 573, 574, 575, 592, 593, 594, 595, 596, 597, 598, 599, 600, 601, 602, 603, 604, 605, 606, 607, 608, 609, 610, 611, 612, 613, 614, 615, 616, 617, 618, 619, 620, 626, 627, 628, 629, 630, 631, 632, 633, 634, 635, 636, 637, 638, 642, 643, 644, 645, 646, 647, 648, 649, 651, 652, 653, 654, 655, 656, 676, 679, 680, 682, 683, 684, 685, 686, 687, 688, 689, 690, 691, 692, 693, 707, 711, 714, 715, 716, 717, 718, 719, 720, 721, 722, 739, 765, 768, 769, 773, 777, 778, 779, 780, 781, 782, 783, 784, 785, 786, 871, 872, 873, 874, 875, 876, 877, 878, 879, 880, 881, 882, 883, 884, or 1048 of AsCas13 or a position corresponding thereto in a Cas13 ortholog; preferably, one or more mutated amino acid residue at position 130, 131, 132, 133, 134, 135, 136, 162, 163, 164, 165, 166, 167, 168, 169, 170, 171, 172, 173, 174, 175, 176, 177, 536, 537, 538, 539, 540, 541, 542, 543, 544, 545, 546, 547, 548, 549, 550, 551, 552, 570, 571, 572, 573, 595, 596, 597, 598, 599, 600, 601, 602, 603, 604, 605, 606, 607, 608, 609, 610, 611, 612, 613, 614, 615, 630, 631, 632, 646, 647, 648, 649, 650, 651, 652, 653, 683, 684, 685, 686, 687, 688, 689, or 690;

[0571] In certain embodiments, the Cas13 protein is modified to have increased activity, i.e. wider PAM specificity. In particular embodiments, the Cas13 protein is modified by mutation of one or more residues including but not limited positions 539, 542, 547, 548, 550, 551, 552, 167, 604, and/or 607 of AsCas13, or the corresponding position of an AsCas13 orthologue, homologue, or variant, preferably mutated amino acid residues at positions 542 or 542 and 607, wherein said mutations preferably are 542R and 607R, such as S542R and K607R; or preferably mutated amino acid residues at positions 542 and 548 (and optionally 552), wherein said mutations preferably are 542R and 548V (and optionally 552R), such as S542R and K548V (and optionally N552R); or at position 532, 538, 542, and/or 595 of LbCas13, or the corresponding position of an AsCas13 orthologue, homologue, or variant, preferably mutated amino acid residues at positions 532 or 532 and 595, wherein said mutations preferably are 532R and 595R, such as G532R and K595R; or preferably mutated amino acid residues at positions 532 and 538 (and optionally 542), wherein said mutations preferably are 532R and 538V (and optionally 542R), such as G532R and K538V (and optionally Y542R), most preferably wherein said mutations are S542R and K607R, S542R and K548V, or S542R, K548V and N552R of AsCas13.

[0572] Deactivated/Inactivated Cas13 Protein

[0573] Where the Cas13 protein has nuclease activity, the Cas13 protein may be modified to have diminished nuclease activity e.g., nuclease inactivation of at least 70%, at least 80%, at least 90%, at least 95%, at least 97%, or 100% as compared with the wild type enzyme; or to put in another way, a Cas13 enzyme having advantageously about 0% of the nuclease activity of the non-mutated or wild type Cas13 enzyme or CRISPR-Cas protein, or no more than about 3% or about 5% or about 10% of the nuclease activity of the non-mutated or wild type Cas13 enzyme, e.g. of the non-mutated or wild type Francisella novicida U112 (FnCas13), Acidaminococcus sp. BV3L6 (AsCas13), Lachnospiraceae bacterium ND2006 (LbCas13) or Moraxella bovoculi 237 (MbCas13 Cas13 enzyme or CRISPR-Cas protein. This is possible by introducing mutations into the nuclease domains of the Cas13 and orthologs thereof.

[0574] In preferred embodiments of the present invention at least one Cas13 protein is used which is a Cas13 nickase. More particularly, a Cas13 nickase is used which does not cleave the target strand but is capable of cleaving only the strand which is complementary to the target strand, i.e. the non-target DNA strand also referred to herein as the strand which is not complementary to the guide sequence. More particularly the Cas13 nickase is a Cas13 protein which comprises a mutation in the arginine at position 1226A in the Nuc domain of Cas13 from Acidaminococcus sp., or a corresponding position in a Cas13 ortholog. In further particular embodiments, the enzyme comprises an arginine-to-alanine substitution or an R1226A mutation. It will be understood by the skilled person that where the enzyme is not AsCas13, a mutation may be made at a residue in a corresponding position. In particular embodiments, the Cas13 is FnCas13 and the mutation is at the arginine at position R1218. In particular embodiments, the Cas13 is LbCas13 and the mutation is at the arginine at position R1138. In particular embodiments, the Cas13 is MbCas13 and the mutation is at the arginine at position R1293.

[0575] In certain embodiments, use is made additionally or alternatively of a CRISPR-Cas protein which is is engineered and can comprise one or more mutations that reduce or eliminate a nuclease activity. The amino acid positions in the FnCas13p RuvC domain include but are not limited to D917A, E1006A, E1028A, D1227A, D1255A, N1257A, D917A, E1006A, E1028A, D1227A, D1255A and N1257A. Applicants have also identified a putative second nuclease domain which is most similar to PD-(D/E)XK nuclease superfamily and Hincll endonuclease like. The point mutations to be generated in this putative nuclease domain to substantially reduce nuclease activity include but are not limited to N580A, N584A, T587A, W609A, D610A, K613A, E614A, D616A, K624A, D625A, K627A and Y629A. In a preferred embodiment, the mutation in the FnCas13p RuvC domain is D917A or E1006A, wherein the D917A or E1006A mutation completely inactivates the DNA cleavage activity of the FnCas13 effector protein. In another embodiment, the mutation in the FnCas13p RuvC domain is D1255A, wherein the mutated FnCas13 effector protein has significantly reduced nucleolytic activity.

[0576] More particularly, the inactivated Cas13 enzymes include enzymes mutated in amino acid positions As908, As993, As1263 of AsCas13 or corresponding positions in Cas13 orthologs. Additionally, the inactivated Cas13 enzymes include enzymes mutated in amino acid position Lb832, 925, 947 or 1180 of LbCas13 or corresponding positions in Cas13 orthologs. More particularly, the inactivated Cas13 enzymes include enzymes comprising one or more of mutations AsD908A, AsE993A, AsD1263A of AsCas13 or corresponding mutations in Cas13 orthologs. Additionally, the inactivated Cas13 enzymes include enzymes comprising one or more of mutations LbD832A, E925A, D947A or D1180A of LbCas13 or corresponding mutations in Cas13 orthologs.

[0577] Mutations can also be made at neighboring residues, e.g., at amino acids near those indicated above that participate in the nuclease activity. In some embodiments, only the RuvC domain is inactivated, and in other embodiments, another putative nuclease domain is inactivated, wherein the effector protein complex functions as a nickase and cleaves only one DNA strand. In a preferred embodiment, the other putative nuclease domain is a HincII-like endonuclease domain.

[0578] The inactivated Cas13 or Cas13 nickase may have associated (e.g., via fusion protein) one or more functional domains, including for example, an adenosine deaminase or catalytic domain thereof. In some cases it is advantageous that additionally at least one heterologous NLS is provided. In some instances, it is advantageous to position the NLS at the N terminus. In general, the positioning of the one or more functional domain on the inactivated Cas13 or Cas13 nickase is one which allows for correct spatial orientation for the functional domain to affect the target with the attributed functional effect. For example, when the functional domain is an adenosine deaminase catalytic domain thereof, the adenosine deaminase catalytic domain is placed in a spatial orientation which allows it to contact and deaminate a target adenine. This may include positions other than the N-/C-terminus of Cas13. In some embodiments, the adenosine deaminase protein or catalytic domain thereof is inserted into an internal loop of Cas13.

### Determination of PAM

[0579] Determination of PAM can be ensured as follows. This experiment closely parallels similar work in E. coli for the heterologous expression of StCas9 (Sapranauskas, R. et al. Nucleic Acids Res 39, 9275-9282 (2011)). Applicants introduce a plasmid containing both a PAM and a resistance gene into the heterologous E. coli, and then plate on the corresponding antibiotic. If there is DNA cleavage of the plasmid, Applicants observe no viable colonies.

[0580] In further detail, the assay is as follows for a DNA target. Two E. coli strains are used in this assay. One carries a plasmid that encodes the endogenous effector protein locus from the bacterial strain. The other strain carries an empty plasmid (e.g. pACYC184, control strain). All possible 7 or 8 bp PAM sequences are presented on an antibiotic resistance plasmid (pUC19 with ampicillin resistance gene). The PAM is located next to the sequence of proto-spacer 1 (the DNA target to the first spacer in the endogenous effector protein locus). Two PAM libraries were cloned. One has a 8 random bp 5′ of the proto-spacer (e.g. total of 65536 different PAM sequences=complexity). The other library has 7 random bp 3′ of the proto-spacer (e.g. total complexity is 16384 different PAMs). Both libraries were cloned to have in average 500 plasmids per possible PAM. Test strain and control strain were transformed with κ′PAM and 3′PAM library in separate transformations and transformed cells were plated separately on ampicillin plates. Recognition and subsequent cutting/interference with the plasmid renders a cell vulnerable to ampicillin and prevents growth. Approximately 12 h after transformation, all colonies formed by the test and control strains where harvested and plasmid DNA was isolated. Plasmid DNA was used as template for PCR amplification and subsequent deep sequencing. Representation of all PAMs in the untransfomed libraries showed the expected representation of PAMs in transformed cells. Representation of all PAMs found in control strains showed the actual representation. Representation of all PAMs in test strain showed which PAMs are not recognized by the enzyme and comparison to the control strain allows extracting the sequence of the depleted PAM.

[0581] The following PAMs have been identified for certain wild-type Cas13 orthologues: the Acidaminococcus sp. BV3L6 Cas13 (AsCas13), Lachnospiraceae bacterium ND2006 Cas13 (LbCas13) and Prevotella albensis (PaCas13) can cleave target sites preceded by a TTTV PAM, where V is A/C or G, FnCas13p, can cleave sites preceded by TTN, where N is A/C/G or T. The Moraxella bovoculi AAX08_00205, Moraxella bovoculi AAX11_00205, Butyrivibrio sp. NC3005, Thiomicrospira sp. XS5, or Lachnospiraceae bacterium MA2020 PAM is 5′ TTN, where N is A/C/G or T. The natural PAM sequence is TTTV or BTTV, wherein B is T/C or G and V is A/C or G and the effector protein is Moraxella lacunata Cas13.

### Codon Optimized Nucleic Acid Sequences

[0582] Where the effector protein is to be administered as a nucleic acid, the application envisages the use of codon-optimized CRISPR-Cas type V protein, and more particularly Cas13-encoding nucleic acid sequences (and optionally protein sequences). An example of a codon optimized sequence, is in this instance a sequence optimized for expression in a eukaryote, e.g., humans (i.e. being optimized for expression in humans), or for another eukaryote, animal or mammal as herein discussed; see, e.g., SaCas9 human codon optimized sequence in WO 2014/093622 (PCT/US2013/074667) as an example of a codon optimized sequence (from knowledge in the art and this disclosure, codon optimizing coding nucleic acid molecule(s), especially as to effector protein (e.g., Cas13) is within the ambit of the skilled artisan). Whilst this is preferred, it will be appreciated that other examples are possible and codon optimization for a host species other than human, or for codon optimization for specific organs is known. In some embodiments, an enzyme coding sequence encoding a DNA/RNA-targeting Cas protein is codon optimized for expression in particular cells, such as eukaryotic cells. The eukaryotic cells may be those of or derived from a particular organism, such as a plant or a mammal, including but not limited to human, or non-human eukaryote or animal or mammal as herein discussed, e.g., mouse, rat, rabbit, dog, livestock, or non-human mammal or primate. In some embodiments, processes for modifying the germ line genetic identity of human beings and/or processes for modifying the genetic identity of animals which are likely to cause them suffering without any substantial medical benefit to man or animal, and also animals resulting from such processes, may be excluded. In general, codon optimization refers to a process of modifying a nucleic acid sequence for enhanced expression in the host cells of interest by replacing at least one codon (e.g., about or more than about 1, 2, 3, 4, 5, 10, 15, 20, 25, 50, or more codons) of the native sequence with codons that are more frequently or most frequently used in the genes of that host cell while maintaining the native amino acid sequence. Various species exhibit particular bias for certain codons of a particular amino acid. Codon bias (differences in codon usage between organisms) often correlates with the efficiency of translation of messenger RNA (mRNA), which is in turn believed to be dependent on, among other things, the properties of the codons being translated and the availability of particular transfer RNA (tRNA) molecules. The predominance of selected tRNAs in a cell is generally a reflection of the codons used most frequently in peptide synthesis. Accordingly, genes can be tailored for optimal gene expression in a given organism based on codon optimization. Codon usage tables are readily available, for example, at the “Codon Usage Database” available at www.kazusa.orjp/codon/ and these tables can be adapted in a number of ways. See Nakamura, Y., et al. “Codon usage tabulated from the international DNA sequence databases: status for the year 2000” Nucl. Acids Res. 28:292 (2000). Computer algorithms for codon optimizing a particular sequence for expression in a particular host cell are also available, such as Gene Forge (Aptagen; Jacobus, Pa.), are also available. In some embodiments, one or more codons (e.g., 1, 2, 3, 4, 5, 10, 15, 20, 25, 50, or more, or all codons) in a sequence encoding a DNA/RNA-targeting Cas protein corresponds to the most frequently used codon for a particular amino acid. As to codon usage in yeast, reference is made to the online Yeast Genome database available at http://www.yeastgenome.org/community/codon_usage.shtml, or Codon selection in yeast, Bennetzen and Hall, J Biol Chem. 1982 Mar. 25; 257(6):3026-31. As to codon usage in plants including algae, reference is made to Codon usage in higher plants, green algae, and cyanobacteria, Campbell and Gowri, Plant Physiol. 1990 January; 92(1): 1-11; as well as Codon usage in plant genes, Murray et al, Nucleic Acids Res. 1989 Jan. 25; 17(2):477-98; or Selection on the codon bias of chloroplast and cyanelle genes in different plant and algal lineages, Morton B R, J Mol Evol. 1998 April; 46(4):449-59.

[0583] In certain example embodiments, the CRISPR Cas protein is selected from Table 1.

TABLE 1

| | | Multi |
|---|---|---|
| C2c2 orthologue | Code | Letter |
| Leptotrichia shahii | C2-2 | Lsh |
| L wadei F0279 (Lw2) | C2-3 | Lw2 |
| Listeria seeligeri | C2-4 | Lse |
| Lachnospiraceae bacterium MA2020 | C2-5 | LbM |
| Lachnospiraceae bacterium NK4A179 | C2-6 | LbNK179 |
| [Clostridium] aminophilum DSM 10710 | C2-7 | Ca |
| Carnobacterium gallinarum DSM 4847 | C2-8 | Cg |
| Carnobacterium gallinarum DSM 4847 | C2-9 | Cg2 |
| Paludibacter propionicigenes WB4 | C2-10 | Pp |
| Listeria weihenstephanensis FSL R9-0317 | C2-11 | Lwei |
| Listeriaceae bacterium FSL M6-0635 | C2-12 | LbFSL |
| Leptotrichia wadei F0279 | C2-13 | Lw |
| Rhodobacter capsulatus SB 1003 | C2-14 | Rc |
| Rhodobacter capsulatus R121 | C2-15 | Rc |
| Rhodobacter capsulatus DE442 | C2-16 | Rc |

[0584] In certain example embodiments, the CRISPR effector protein is a Cas13a protein selected from Table 2

TABLE 2

| | | | |
|---|---|---|---|
| c2c2-5 | 1 | Lachno- | MQISKVNHKHVAVGQKDRERITGFIYNDPVGDEKSLEDVVA |
| | | spiraceae | KRANDTKVLFNVFNTKDLYDSQESDKSEKDKEIISKGAKFV |
| | | bacterium | AKSFNSAITILKKQNKIYSTLTSQQVIKELKDKFGGARIYDDD |
| | | MA2020 | IEEALTETLKKSFRKENVRNSIKVLIENAAGIRSSLSKDEEELI |
| | | (SEQ ID | QEYFVKQLVEEYTKTKLQKNVVKSIKNQNMVIQPDSDSQVL |
| | | No. 67) | SLSESRREKQSSAVSSDTLVNCKEKDVLKAFLTDYAVLDEDE |
| | | | RNSLLWKLRNLVNLYFYGSESIRDYSYTKEKSVWKEHDEQK |
| | | | ANKTLFIDEICHITKIGKNGKEQKVLDYEENRSRCRKQNINY |
| | | | YRSALNYAKNNTSGIFENEDSNHFWIHLIENEVERLYNGIEN |
| | | | GEEFKFETGYISEKVWKAVINHLSIKYIALGKAVYNYAMKEL |
| | | | SSPGDIEPGKIDDSYINGITSFDYEIIKAEESLQRDISMNVVFAT |
| | | | NYLACATVDTDKDFLLFSKEDIRSCTKKDGNLCKNIMQFWG |
| | | | GYSTWKNFCEEYLKDDKDALELLYSLKSMLYSMRNSSFHFS |
| | | | TENVDNGSWDTELIGKLFEEDCNRAARIEKEKFYNNNLHMF |
| | | | YSSSLLEKVLERLYSSHHERASQVPSFNRVFVRKNFPSSLSEQ |
| | | | RITPKFTDSKDEQIWQSAVYYLCKEIYYNDFLQSKEAYKLFR |
| | | | EGVKNLDKNDINNQKAADSFKQAVVYYGKAIGNATLSQVC |
| | | | QAIMTEYNRQNNDGLKKKSAYAEKQNSNKYKHYPLFLKQV |
| | | | LQSAFWEYLDENKEIYGFISAQIHKSNVEIKAEDFIANYSSQQ |
| | | | YKKLVDKVKKTPELQKWYTLGRLINPRQANQFLGSIRNYVQ |
| | | | FVKDIQRRAKENGNPIRNYYEVLESDSIIKILEMCTKLNGTTS |
| | | | NDIHDYFRDEDEYAEYISQFVNFGDVHSGAALNAFCNSESEG |
| | | | KKNGIYYDGINPIVNRNWVLCKLYGSPDLISKITSRVNENMIH |
| | | | DFHKQEDLIREYQIKGICSNKKEQQDLRTFQVLKNRVELRDI |
| | | | VEYSEIINELYGQLIKWCYLRERDLMYFQLGFHYLCLNNASS |
| | | | KEADYIKINVDDRNISGAILYQIAAMYINGLPVYYKKDDMY |
| | | | VALKSGKKASDELNSNEQTSKKINYFLKYGNNILGDKKDQL |
| | | | YLAGLELFENVAEHENIIIFRNEIDHFHYFYDRDRSMLDLYSE |
| | | | VFDRFFTYDMKLRKNVVNMLYNILLDHNIVSSFVFETGEKK |
| | | | VGRGDSEVIKPSAKIRLRANNGVSSDVFTYKVGSKDELKIAT |
| | | | LPAKNEEFLLNVARLIYYPDMEAVSENMVREGVVKVEKSND |
| | | | KKGKISRGSNTRSSNQSKYNNKSKNRMNYSMGSIFEKMDLK |
| | | | FD |
| c2c2-6 | 2 | Lachno- | MKISKVREENRGAKLTVNAKTAVVSENRSQEGILYNDPSRY |
| | | spiraceae | GKSRKNDEDRDRYIESRLKSSGKLYRIFNEDKNKRETDELQ |
| | | bacterium | WFLSEIVKKINRRNGLVLSDMLSVDDRAFEKAFEKYAELSYT |
| | | NK4A179 | NRRNKVSGSPAFETCGVDAATAERLKGIISETNFINRIKNNID |
| | | (SEQ ID | NKVSEDIIDRIIAKYLKKSLCRERVKRGLKKLLMNAFDLPYS |
| | | No. 68) | DPDIDVQRDFIDYVLEDFYHVRAKSQVSRSIKNMNMPVQPE |
| | | | GDGKFAITVSKGGTESGNKRSAEKEAFKKFLSDYASLDERV |
| | | | RDDMLRRMRRLVVLYFYGSDDSKLSDVNEKFDVWEDHAA |
| | | | RRVDNREFIKLPLENKLANGKTDKDAERIRKNTVKELYRNQ |
| | | | NIGCYRQAVKAVEEDNNGRYFDDKMLNMFFIHRIEYGVEKI |
| | | | YANLKQVTEFKARTGYLSEKIWKDLINYISIKYIAMGKAVYN |
| | | | YAMDELNASDKKEIELGKISEEYLSGISSFDYELIKAEEMLQR |
| | | | ETAVYVAFAARHLSSQTVELDSENSDFLLLKPKGTMDKNDK |
| | | | NKLASNNILNFLKDKETLRDTILQYFGGHSLWTDFPFDKYLA |
| | | | GGKDDVDFLTDLKDVIYSMRNDSFHYATENHNNGKWNKEL |
| | | | ISAMFEHETERMTVVMKDKFYSNNLPMFYKNDDLKKLLIDL |
| | | | YKDNVERASQVPSFNKVFVRKNFPALVRDKDNLGIELDLKA |
| | | | DADKGENELKFYNALYYMFKEIYYNAFLNDKNVRERFITKA |
| | | | TKVADNYDRNKERNLKDRIKSAGSDEKKKLREQLQNYIAEN |
| | | | DFGQRIKNIVQVNPDYTLAQICQLIMTEYNQQNNGCMQKKS |
| | | | AARKDINKDSYQHYKMLLLVNLRKAFLEFIKENYAFVLKPY |
| | | | KHDLCDKADFVPDFAKYVKPYAGLISRVAGSSELQKWYIVS |
| | | | RFLSPAQANHMLGFLHSYKQYVWDIYRRASETGTEINHSIAE |
| | | | DKIAGVDITDVDAVIDLSVKLCGTISSEISDYFKDDEVYAEYI |
| | | | SSYLDFEYDGGNYKDSLNRFCNSDAVNDQKVALYYDGEHP |
| | | | KLNRNIILSKLYGERRFLEKITDRVSRSDIVEYYKLKKETSQY |
| | | | QTKGIFDSEDEQKNIKKFQEMKNIVEFRDLMDYSEIADELQG |
| | | | QLINWIYLRERDLMNFQLGYHYACLNNDSNKQATYVTLDY |
| | | | QGKKNRKINGAILYQICAMYINGLPLYYVDKDSSEWTVSDG |
| | | | KESTGAKIGEFYRYAKSFENTSDCYASGLEIFENISEHDNITEL |
| | | | RNYIEHFRYYSSFDRSFLGIYSEVFDRFFTYDLKYRKNVPTIL |
| | | | YNILLQHFVNVRFEFVSGKKMIGIDKKDRKIAKEKECARITIR |
| | | | EKNGVYSEQFTYKLKNGTVYVDARDKRYLQSIIRLLFYPEK |
| | | | VNMDEMIEVKEKKKPSDNNTGKGYSKRDRQQDRKEYDKY |
| | | | KEKKKKEGNFLSGMGGNINWDEINAQLKN |
| c2c2-7 | 3 | [Clostridium] | MKFSKVDHTRSAVGIQKATDSVHGMLYTDPKKQEVNDLDK |
| | | aminophilum | RFDQLNVKAKRLYNVFNQSKAEEDDDEKRFGKVVKKLNRE |
| | | DSM 10710 | LKDLLFHREVSRYNSIGNAKYNYYGIKSNPEEIVSNLGMVES |
| | | (SEQ ID | LKGERDPQKVISKLLLYYLRKGLKPGTDGLRMILEASCGLRK |
| | | No. 69) | LSGDEKELKVFLQTLDEDFEKKTFKKNLIRSIENQNMAVQPS |
| | | | NEGDPIIGITQGRFNSQKNEEKSAIERMMSMYADLNEDHRED |
| | | | VLRKLRRLNVLYFNVDTEKTEEPTLPGEVDTNPVFEVWHDH |
| | | | EKGKENDRQFATFAKILTEDRETRKKEKLAVKEALNDLKSAI |
| | | | RDHNIMAYRCSIKVTEQDKDGLFFEDQRINRFWIHHIESAVE |
| | | | RILASINPEKLYKLRIGYLGEKVWKDLLNYLSIKYIAVGKAV |
| | | | FHFAMEDLGKTGQDIELGKLSNSVSGGLTSFDYEQIRADETL |
| | | | QRQLSVEVAFAANNLFRAVVGQTGKKIEQSKSEENEEDFLL |
| | | | WKAEKIAESIKKEGEGNTLKSILQFFGGASSWDLNHFCAAYG |
| | | | NESSALGYETKFADDLRKAIYSLRNETFHFTTLNKGSFDWNA |
| | | | KLIGDMFSHEAATGIAVERTRFYSNNLPMFYRESDLKRIMDH |
| | | | LYNTYHPRASQVPSFNSVFVRKNFRLFLSNTLNTNTSFDTEV |
| | | | YQKWESGVYYLFKEIYYNSFLPSGDAHHLFFEGLRRIRKEAD |
| | | | NLPIVGKEAKKRNAVQDFGRRCDELKNLSLSAICQMIMTEY |
| | | | NEQNNGNRKVKSTREDKRKPDIFQHYKMLLLRTLQEAFAIYI |
| | | | RREEFKFIFDLPKTLYVMKPVEEFLPNWKSGMFDSLVERVK |
| | | | QSPDLQRWYVLCKFLNGRLLNQLSGVIRSYIQFAGDIQRRAK |
| | | | ANHNRLYMDNTQRVEYYSNVLEVVDFCIKGTSRFSNVFSDY |
| | | | FRDEDAYADYLDNYLQFKDEKIAEVSSFAALKTFCNEEEVK |
| | | | AGIYMDGENPVMQRNIVMAKLFGPDEVLKNVVPKVTREEIE |
| | | | EYYQLEKQIAPYRQNGYCKSEEDQKKLLRFQRIKNRVEFQTI |
| | | | TEFSEIINELLGQLISWSFLRERDLLYFQLGFHYLCLHNDTEK |
| | | | PAEYKEISREDGTVIRNAILHQVAAMYVGGLPVYTLADKKL |
| | | | AAFEKGEADCKLSISKDTAGAGKKIKDFFRYSKYVLIKDRML |
| | | | TDQNQKYTIYLAGLELFENTDEHDNITDVRKYVDHFKYYAT |
| | | | SDENAMSILDLYSEIHDRFFTYDMKYQKNVANMLENILLRH |
| | | | FVLIRPEFFTGSKKVGEGKKITCKARAQIEIAENGMRSEDFTY |
| | | | KLSDGKKNISTCMIAARDQKYLNTVARLLYYPHEAKKSIVD |
| | | | TREKKNNKKTNRGDGTFNKQKGTARKEKDNGPREFNDTGF |
| | | | SNTPFAGFDPFRNS |
| c2c2-8 | 5 | Carnobacterium | MRITKVKIKLDNKLYQVTMQKEEKYGTLKLNEESRKSTAEIL |
| | | gallinarum | RLKKASFNKSFHSKTINSQKENKNATIKKNGDYISQIFEKLVG |
| | | DSM 4847 | VDTNKNIRKPKMSLTDLKDLPKKDLALFIKRKFKNDDIVEIK |
| | | (SEQ ID | NLDLISLFYNALQKVPGEHFTDESWADFCQEMMPYREYKNK |
| | | No. 70) | FIERKIILLANSIEQNKGFSINPETFSKRKRVLHQWAIEVQERG |
| | | | DFSILDEKLSKLAEIYNFKKMCKRVQDELNDLEKSMKKGKN |
| | | | PEKEKEAYKKQKNFKIKTIWKDYPYKTHIGLIEKIKENEELN |
| | | | QFNIEIGKYFEHYFPIKKERCTEDEPYYLNSETIATTVNYQLK |
| | | | NALISYLMQIGKYKQFGLENQVLDSKKLQEIGIYEGFQTKFM |
| | | | DACVFATSSLKNIIEPMRSGDILGKREFKEAIATSSFVNYHHF |
| | | | FPYFPFELKGMKDRESELIPFGEQTEAKQMQNIWALRGSVQQ |
| | | | IRNEIFHSFDKNQKFNLPQLDKSNFEFDASENSTGKSQSYIET |
| | | | DYKFLFEAEKNQLEQFFIERIKSSGALEYYPLKSLEKLFAKKE |
| | | | MKFSLGSQVVAFAPSYKKLVKKGHSYQTATEGTANYLGLS |
| | | | YYNRYELKEESFQAQYYLLKLIYQYVFLPNFSQGNSPAFRET |
| | | | VKAILRINKDEARKKMKKNKKFLRKYAFEQVREMEFKETPD |
| | | | QYMSYLQSEMREEKVRKAEKNDKGFEKNITMNFEKLLMQIF |
| | | | VKGFDVFLTTFAGKELLLSSEEKVIKETEISLSKKINEREKTLK |
| | | | ASIQVEHQLVATNSAISYWLFCKLLDSRHLNELRNEMIKFKQ |
| | | | SRIKFNHTQHAELIQNLLPIVELTILSNDYDEKNDSQNVDVSA |
| | | | YFEDKSLYETAPYVQTDDRTRVSFRPILKLEKYHTKSLIEALL |
| | | | KDNPQFRVAATDIQEWMHKREEIGELVEKRKNLHTEWAEG |
| | | | QQTLGAEKREEYRDYCKKIDRFNWKANKVTLTYLSQLHYLI |
| | | | TDLLGRMVGFSALFERDLVYFSRSFSELGGETYHISDYKNLS |
| | | | GVLRLNAEVKPIKIKNIKVIDNEENPYKGNEPEVKPFLDRLH |
| | | | AYLENVIGIKAVHGKIRNQTAHLSVLQLELSMIESMNNLRDL |
| | | | MAYDRKLKNAVTKSMIKILDKHGMILKLKIDENHKNFEIESL |
| | | | IPKEIIHLKDKAIKTNQVSEEYCQLVLALLTTNPGNQLN |
| c2c2-9 | 6 | Carnobacterium | MRMTKVKINGSPVSMNRSKLNGHLVWNGTTNTVNILTKKE |
| | | gallinarum | QSFAASFLNKTLVKADQVKGYKVLAENIFIIFEQLEKSNSEKP |
| | | DSM 4847 | SVYLNNIRRLKEAGLKRFFKSKYHEEIKYTSEKNQSVPTKLN |
| | | (SEQ ID | LIPLFFNAVDRIQEDKFDEKNWSYFCKEMSPYLDYKKSYLNR |
| | | No. 71) | KKEILANSIQQNRGFSMPTAEEPNLLSKRKQLFQQWAMKFQ |
| | | | ESPLIQQNNFAVEQFNKEFANKINELAAVYNVDELCTAITEK |
| | | | LMNFDKDKSNKTRNFEIKKLWKQHPHNKDKALIKLFNQEG |
| | | | NEALNQFNIELGKYFEHYFPKTGKKESAESYYLNPQTIIKTVG |
| | | | YQLRNAFVQYLLQVGKLHQYNKGVLDSQTLQEIGMYEGFQ |
| | | | TKFMDACVFASSSLRNIIQATTNEDILTREKFKKELEKNVELK |
| | | | HDLFFKTEIVEERDENPAKKIAMTPNELDLWAIRGAVQRVR |
| | | | NQIFHQQINKRHEPNQLKVGSFENGDLGNVSYQKTIYQKLFD |
| | | | AEIKDIEIYFAEKIKSSGALEQYSMKDLEKLFSNKELTLSLGG |
| | | | QVVAFAPSYKKLYKQGYFYQNEKTIELEQFTDYDFSNDVFK |
| | | | ANYYLIKLIYHYVFLPQFSQANNKLFKDTVHYVIQQNKELNT |
| | | | TEKDKKNNKKIRKYAFEQVKLMKNESPEKYMQYLQREMQE |
| | | | ERTIKEAKKTNEEKPNYNFEKLLIQIFIKGFDTFLRNFDLNLNP |
| | | | AEELVGTVKEKAEGLRKRKERIAKILNVDEQIKTGDEEIAFW |
| | | | IFAKLLDARHLSELRNEMIKFKQSSVKKGLIKNGDLIEQMQPI |
| | | | LELCILSNDSESMEKESFDKIEVFLEKVELAKNEPYMQEDKL |
| | | | TPVKFRFMKQLEKYQTRNFIENLVIENPEFKVSEKIVLNWHE |
| | | | EKEKIADLVDKRTKLHEEWASKAREIEEYNEKIKKNKSKKL |
| | | | DKPAEFAKFAEYKIICEAIENFNRLDHKVRLTYLKNLHYLMI |
| | | | DLMGRMVGFSVLFERDFVYMGRSYSALKKQSIYLNDYDTF |
| | | | ANIRDWEVNENKHLFGTSSSDLTFQETAEFKNLKKPMENQL |
| | | | KALLGVTNHSFEIRNNIAHLHVLRNDGKGEGVSLLSCMNDL |
| | | | RKLMSYDRKLKNAVTKAIIKILDKHGMILKLTNNDHTKPFEI |
| | | | ESLKPKKIIHLEKSNHSFPMDQVSQEYCDLVKKMLVFTN |
| c2c2-10 | 7 | Paludibacter | MRVSKVKVKDGGKDKMVLVHRKTTGAQLVYSGQPVSNET |
| | | propionicigenes | SNILPEKKRQSFDLSTLNKTIIKFDTAKKQKLNVDQYKIVEKI |
| | | WB4 | FKYPKQELPKQIKAEEILPFLNHKFQEPVKWKNGKEESFNL |
| | | (SEQ ID | TLLIVEAVQAQDKRKLQPYYDWKTWYIQTKSDLLKKSIENN |
| | | No. 72) | RIDLTENLSKRKKALLAWETEFTASGSIDLTHYHKVYMTDV |
| | | | LCKMLQDVKPLTDDKGKINTNAYHRGLKKALQNHQPAIFGT |
| | | | REVPNEANRADNQLSIYHLEVVKYLEHYFPIKTSKRRNTADD |
| | | | IAHYLKAQTLKTTIEKQLVNAIRANIIQQGKTNHHELKADTT |
| | | | SNDLIRIKTNEAFVLNLTGTCAFAANNIRNMVDNEQTNDILG |
| | | | KGDFIKSLLKDNTNSQLYSFFFGEGLSTNKAEKETQLWGIRG |
| | | | AVQQIRNNVNHYKKDALKTVFNISNFENPTITDPKQQTNYA |
| | | | DTIYKARFINELEKIPEAFAQQLKTGGAVSYYTIENLKSLLTT |
| | | | FQFSLCRSTIPFAPGFKKVFNGGINYQNAKQDESFYELMLEQ |
| | | | YLRKENFAEESYNARYFMLKLIYNNLFLPGFTTDRKAFADSV |
| | | | GFVQMQNKKQAEKVNPRKKEAYAFEAVRPMTAADSIADY |
| | | | MAYVQSELMQEQNKKEEKVAEETRINFEKFVLQVFIKGFDS |
| | | | FLRAKEFDFVQMPQPQLTATASNQQKADKLNQLEASITADC |
| | | | KLTPQYAKADDATHIAFYVFCKLLDAAHLSNLRNELIKFRES |
| | | | VNEFKFHHLLEIIEICLLSADVVPTDYRDLYSSEADCLARLRP |
| | | | FIEQGADITNWSDLFVQSDKHSPVIHANIELSVKYGTTKLLEQ |
| | | | IINKDTQFKTTEANFTAWNTAQKSIEQLIKQREDHHEQWVK |
| | | | AKNADDKEKQERKREKSNFAQKFIEKHGDDYLDICDYINTY |
| | | | NWLDNKMHFVHLNRLHGLTTELLGRMAGFVALFDRDFQFF |
| | | | DEQQIADEFKLHGFVNLHSIDKKLNEVPTKKIKEIYDIRNKIIQ |
| | | | INGNKINESVRANLIQFISSKRNYYNNAFLHVSNDEIKEKQM |
| | | | YDIRNHIAHFNYLTKDAADFSLIDLINELRELLHYDRKLKNA |
| | | | VSKAFIDLFDKHGMILKLKLNADHKLKVESLEPKKIYHLGSS |
| | | | AKDKPEYQYCTNQVMMAYCNMCRSLLEMKK |
| c2c2-11 | 9 | Listeria | MLALLHQEVPSQKLHNLKSLNTESLTKLFKPKFQNMISYPPS |
| | | weihenstephan- | KGAEHVQFCLTDIAVPAIRDLDEIKPDWGIFFEKLKPYTDWA |
| | | ensis | ESYIHYKQTTIQKSIEQNKIQSPDSPRKLVLQKYVTAFLNGEP |
| | | FSL R9- | LGLDLVAKKYKLADLAESFKVVDLNEDKSANYKIKACLQQ |
| | | 0317 | HQRNILDELKEDPELNQYGIEVKKYIQRYFPIKRAPNRSKHA |
| | | (SEQ ID | RADFLKKELIESTVEQQFKNAVYHYVLEQGKMEAYELTDPK |
| | | No. 73) | TKDLQDIRSGEAFSFKFINACAFASNNLKMILNPECEKDILGK |
| | | | GDFKKNLPNSTTQSDVVKKMIPFFSDEIQNVNFDEAIWAIRG |
| | | | SIQQIRNEVYHCKKHSWKSILKIKGFEFEPNNMKYTDSDMQK |
| | | | LMDKDIAKIPDFIEEKLKSSGIIRFYSHDKLQSIWEMKQGFSL |
| | | | LTTNAPFVPSFKRVYAKGHDYQTSKNRYYDLGLTTFDILEY |
| | | | GEEDFRARYFLTKLVYYQQFMPWFTADNNAFRDAANFVLR |
| | | | LNKNRQQDAKAFINIREVEEGEMPRDYMGYVQGQIAIHEDS |
| | | | TEDTPNHFEKFISQVFIKGFDSHMRSADLKFIKNPRNQGLEQS |
| | | | EIEEMSFDIKVEPSFLKNKDDYIAFWTFCKMLDARHLSELRN |
| | | | EMIKYDGHLTGEQEIIGLALLGVDSRENDWKQFFSSEREYEK |
| | | | IMKGYVGEELYQREPYRQSDGKTPILFRGVEQARKYGTETVI |
| | | | QRLFDASPEFKVSKCNITEWERQKETIEETIERRKELHNEWE |
| | | | KNPKKPQNNAFFKEYKECCDAIDAYNWHKNKTTLVYVNEL |
| | | | HHLLIEILGRYVGYVAIADRDFQCMANQYFKHSGITERVEY |
| | | | WGDNRLKSIKKLDTFLKKEGLFVSEKNARNHIAHLNYLSLK |
| | | | SECTLLYLSERLREIFKYDRKLKNAVSKSLIDILDRHGMSVVF |
| | | | ANLKENKHRLVIKSLEPKKLRHLGEKKIDNGYIETNQVSEEY |
| | | | CGIVKRLLEI |
| c2c2-12 | 10 | Listeriaceae | MKITKMRVDGRTIVMERTSKEGQLGYEGIDGNKTTEIIFDKK |
| | | bacterium | KESFYKSILNKTVRKPDEKEKNRRKQAINKAINKEITELMLA |
| | | FSL M6- | VLHQEVPSQKLHNLKSLNTESLTKLFKPKFQNMISYPPSKGA |
| | | 0635 = | EHVQFCLTDIAVPAIRDLDEIKPDWGIFFEKLKPYTDWAESYI |
| | | Listeria | HYKQTTIQKSIEQNKIQSPDSPRKLVLQKYVTAFLNGEPLGL |
| | | newyorkensis | DLVAKKYKLADLAESFKLVDLNEDKSANYKIKACLQQHQR |
| | | FSL | NILDELKEDPELNQYGIEVKKYIQRYFPIKRAPNRSKHARADF |
| | | M6-0635 | LKKELIESTVEQQFKNAVYHYVLEQGKMEAYELTDPKTKDL |
| | | (SEQ ID | QDIRSGEAFSFKFINACAFASNNLKMILNPECEKDILGKGNFK |
| | | No. 74) | KNLPNSTTRSDVVKKMIPFFSDELQNVNFDEAIWAIRGSIQQI |
| | | | RNEVYHCKKHSWKSILKIKGFEFEPNNMKYADSDMQKLMD |
| | | | KDIAKIPEFIEEKLKSSGVVRFYRHDELQSIWEMKQGFSLLTT |
| | | | NAPFVPSFKRVYAKGHDYQTSKNRYYNLDLTTFDILEYGEE |
| | | | DFRARYFLTKLVYYQQFMPWFTADNNAFRDAANFVLRLNK |
| | | | NRQQDAKAFINIREVEEGEMPRDYMGYVQGQIAIHEDSIEDT |
| | | | PNHFEKFISQVFIKGFDRHMRSANLKFIKNPRNQGLEQSEIEE |
| | | | MSFDIKVEPSFLKNKDDYIAFWIFCKMLDARHLSELRNEMIK |
| | | | YDGHLTGEQEIIGLALLGVDSRENDWKQFFSSEREYEKIMKG |
| | | | YVVEELYQREPYRQSDGKTPILFRGVEQARKYGTETVIQRLF |
| | | | DANPEFKVSKCNLAEWERQKETIEETIKRRKELHNEWAKNP |
| | | | KKPQNNAFFKEYKECCDAIDAYNWHKNKTTLAYVNELHHL |
| | | | LIEILGRYVGYVAIADRDFQCMANQYFKHSGITERVEYWGD |
| | | | NRLKSIKKLDTFLKKEGLFVSEKNARNHIAHLNYLSLKSECT |
| | | | LLYLSERLREIFKYDRKLKNAVSKSLIDILDRHGMSVVFANL |
| | | | KENKHRLVIKSLEPKKLRHLGGKKIDGGYIETNQVSEEYCGI |
| | | | VKRLLEM |
| c2c2-13 | 12 | Leptotrichia | MKVTKVDGISHKKYIEEGKLVKSTSEENRTSERLSELLSIRLD |
| | | wadei | IYIKNPDNASEEENRIRRENLKKFFSNKVLHLKDSVLYLKNR |
| | | F0279 | KEKNAVQDKNYSEEDISEYDLKNKNSFSVLKKILLNEDVNSE |
| | | (SEQ ID | ELEIFRKDVEAKLNKINSLKYSFEENKANYQKINENNVEKVG |
| | | No. 75) | GKSKRNIIYDYYRESAKRNDYINNVQEAFDKLYKKEDIEKLF |
| | | | FLIENSKKHEKYKIREYYHKIIGRKNDKENFAKIIYEEIQNVN |
| | | | NIKELIEKIPDMSELKKSQVFYKYYLDKEELNDKNIKYAFCH |
| | | | FVEIEMSQLLKNYVYKRLSNISNDKIKRIFEYQNLKKLIENKL |
| | | | LNKLDTYVRNCGKYNYYLQVGEIATSDFIARNRQNEAFLRNI |
| | | | IGVSSVAYFSLRNILETENENDITGRMRGKTVKNNKGEEKYV |
| | | | SGEVDKIYNENKQNEVKENLKMFYSYDFNMDNKNEIEDFFA |
| | | | NIDEAISSIRHGIVHFNLELEGKDIFAFKNIAPSEISKKMFQNEI |
| | | | NEKKLKLKIFKQLNSANVFNYYEKDVIIKYLKNTKFNFVNK |
| | | | NIPFVPSFTKLYNKIEDLRNTLKFFWSVPKDKEEKDAQIYLLK |
| | | | NIYYGEFLNKFVKNSKVFFKITNEVIKINKQRNQKTGHYKYQ |
| | | | KFENIEKTVPVEYLAIIQSREMINNQDKEEKNTYIDFIQQIFLK |
| | | | GFIDYLNKNNLKYIESNNNNDNNDIFSKIKIKKDNKEKYDKIL |
| | | | KNYEKHNRNKEIPHEINEFVREIKLGKILKYTENLNMFYLILK |
| | | | LLNHKELTNLKGSLEKYQSANKEETFSDELELINLLNLDNNR |
| | | | VTEDFELEANEIGKFLDFNENKIKDRKELKKFDTNKIYFDGE |
| | | | NIIKHRAFYNIKKYGMLNLLEKIADKAKYKISLKELKEYSNK |
| | | | KNEIEKNYTMQQNLHRKYARPKKDEKFNDEDYKEYEKAIG |
| | | | NIQKYTHLKNKVEFNELNLLQGLLLKILHRLVGYTSIWERDL |
| | | | RFRLKGEFPENHYIEEIFNFDNSKNVKYKSGQIVEKYINFYKE |
| | | | LYKDNVEKRSIYSDKKVKKLKQEKKDLYIRNYIAHFNYIPHA |
| | | | EISLLEVLENLRKLLSYDRKLKNAIMKSIVDILKEYGFVATFK |
| | | | IGADKKIEIQTLESEKIVHLKNLKKKKLMTDRNSEELCELVK |
| | | | VMFEYKALE |
| c2c2-14 | 15 | Rhodobacter | MQIGKVQGRTISEFGDPAGGLKRKISTDGKNRKELPAHLSSD |
| | | capsulatus | PKALIGQWISGIDKIYRKPDSRKSDGKAIHSPTPSKMQFDARD |
| | | SB 1003 | DLGEAFWKLVSEAGLAQDSDYDQFKRRLHPYGDKFQPADS |
| | | (SEQ ID | GAKLKFEADPPEPQAFHGRWYGAMSKRGNDAKELAAALYE |
| | | No. 76) | HLHVDEKRIDGQPKRNPKTDKFAPGLVVARALGIESSVLPRG |
| | | | MARLARNWGEEEIQTYFVVDVAASVKEVAKAAVSAAQAFD |
| | | | PPRQVSGRSLSPKVGFALAEHLERVTGSKRCSFDPAAGPSVL |
| | | | ALHDEVKKTYKRLCARGKNAARAFPADKTELLALMRHTHE |
| | | | NRVRNQMVRMGRVSEYRGQQAGDLAQSHYWTSAGQTEIK |
| | | | ESEIFVRLWVGAFALAGRSMKAWIDPMGKIVNTEKNDRDLT |
| | | | AAVNIRQVISNKEMVAEAMARRGIYFGETPELDRLGAEGNE |
| | | | GFVFALLRYLRGCRNQTFHLGARAGFLKEIRKELEKTRWGK |
| | | | AKEAEHVVLTDKTVAAIRAIIDNDAKALGARLLADLSGAFV |
| | | | AHYASKEHFSTLYSEIVKAVKDAPEVSSGLPRLKLLLKRADG |
| | | | VRGYVHGLRDTRKHAFATKLPPPPAPRELDDPATKARYIALL |
| | | | RLYDGPFRAYASGITGTALAGPAARAKEAATALAQSVNVTK |
| | | | AYSDVMEGRTSRLRPPNDGETLREYLSALTGETATEFRVQIG |
| | | | YESDSENARKQAEFIENYRRDMLAFMFEDYIRAKGFDWILKI |
| | | | EPGATAMTRAPVLPEPIDTRGQYEHWQAALYLVMHFVPASD |
| | | | VSNLLHQLRKWEALQGKYELVQDGDATDQADARREALDL |
| | | | VKRFRDVLVLFLKTGEARFEGRAAPFDLKPFRALFANPATFD |
| | | | RLFMATPTTARPAEDDPEGDGASEPELRVARTLRGLRQIARY |
| | | | NHMAVLSDLFAKHKVRDEEVARLAEIEDETQEKSQIVAAQE |
| | | | LRTDLHDKVMKCHPKTISPEERQSYAAAIKTIEEHRFLVGRV |
| | | | YLGDHLRLHRLMMDVIGRLIDYAGAYERDTGTFLINASKQL |
| | | | GAGADWAVTIAGAANTDARTQTRKDLAHFNVLDRADGTPD |
| | | | LTALVNRAREMMAYDRKRKNAVPRSILDMLARLGLTLKWQ |
| | | | MKDHLLQDATITQAAIKHLDKVRLTVGGPAAVTEARFSQDY |
| | | | LQMVAAVFNGSVQNPKPRRRDDGDAWHKPPKPATAQSQPD |
| | | | QKPPNKAPSAGSRLPPPQVGEVYEGVVVKVIDTGSLGFLAVE |
| | | | GVAGNIGLHISRLRRIREDAIIVGRRYRFRVEIYVPPKSNTSKL |
| | | | NAADLVRID |
| c2c2-15 | 16 | Rhodobacter | MQIGKVQGRTISEFGDPAGGLKRKISTDGKNRKELPAHLSSD |
| | | capsulatus | PKALIGQWISGIDKIYRKPDSRKSDGKAIHSPTPSKMQFDARD |
| | | R121 | DLGEAFWKLVSEAGLAQDSDYDQFKRRLHPYGDKFQPADS |
| | | (SEQ ID | GAKLKFEADPPEPQAFHGRWYGAMSKRGNDAKELAAALYE |
| | | No. 77) | HLHVDEKRIDGQPKRNPKTDKFAPGLVVARALGIESSVLPRG |
| | | | MARLARNWGEEEIQTYFVVDVAASVKEVAKAAVSAAQAFD |
| | | | PPRQVSGRSLSPKVGFALAEHLERVTGSKRCSFDPAAGPSVL |
| | | | ALHDEVKKTYKRLCARGKNAARAFPADKTELLALMRHTHE |
| | | | NRVRNQMVRMGRVSEYRGQQAGDLAQSHYWTSAGQTEIK |
| | | | ESEIFVRLWVGAFALAGRSMKAWIDPMGKIVNTEKNDRDLT |
| | | | AAVNIRQVISNKEMVAEAMARRGIYFGETPELDRLGAEGNE |
| | | | GFVFALLRYLRGCRNQTFHLGARAGFLKEIRKELEKTRWGK |
| | | | AKEAEHVVLTDKTVAAIRAIIDNDAKALGARLLADLSGAFV |
| | | | AHYASKEHFSTLYSEIVKAVKDAPEVSSGLPRLKLLLKRADG |
| | | | VRGYVHGLRDTRKHAFATKLPPPPAPRELDDPATKARYIALL |
| | | | RLYDGPFRAYASGITGTALAGPAARAKEAATALAQSVNVTK |
| | | | AYSDVMEGRSSRLRPPNDGETLREYLSALTGETATEFRVQIG |
| | | | YESDSENARKQAEFIENYRRDMLAFMFEDYIRAKGFDWILKI |
| | | | EPGATAMTRAPVLPEPIDTRGQYEHWQAALYLVMHFVPASD |
| | | | VSNLLHQLRKWEALQGKYELVQDGDATDQADARREALDL |
| | | | VKRFRDVLVLFLKTGEARFEGRAAPFDLKPFRALFANPATFD |
| | | | RLFMATPTTARPAEDDPEGDGASEPELRVARTLRGLRQIARY |
| | | | NHMAVLSDLFAKHKVRDEEVARLAEIEDETQEKSQIVAAQE |
| | | | LRTDLHDKVMKCHPKTISPEERQSYAAAIKTIEEHRFLVGRV |
| | | | YLGDHLRLHRLMMDVIGRLIDYAGAYERDTGTFLINASKQL |
| | | | GAGADWAVTIAGAANTDARTQTRKDLAHFNVLDRADGTPD |
| | | | LTALVNRAREMMAYDRKRKNAVPRSILDMLARLGLTLKWQ |
| | | | MKDHLLQDATITQAAIKHLDKVRLTVGGPAAVTEARFSQDY |
| | | | LQMVAAVFNGSVQNPKPRRRDDGDAWHKPPKPATAQSQPD |
| | | | QKPPNKAPSAGSRLPPPQVGEVYEGVVVKVIDTGSLGFLAVE |
| | | | GVAGNIGLHISRLRRIREDAIIVGRRYRFRVEIYVPPKSNTSKL |
| | | | NAADLVRID |
| c2c2-16 | 17 | Rhodobacter | MQIGKVQGRTISEFGDPAGGLKRKISTDGKNRKELPAHLSSD |
| | | capsulatus | PKALIGQWISGIDKIYRKPDSRKSDGKAIHSPTPSKMQFDARD |
| | | DE442 | DLGEAFWKLVSEAGLAQDSDYDQFKRRLHPYGDKFQPADS |
| | | (SEQ ID | GAKLKFEADPPEPQAFHGRWYGAMSKRGNDAKELAAALYE |
| | | No. 78) | HLHVDEKRIDGQPKRNPKTDKFAPGLVVARALGIESSVLPRG |
| | | | MARLARNWGEEEIQTYFVVDVAASVKEVAKAAVSAAQAFD |
| | | | PPRQVSGRSLSPKVGFALAEHLERVTGSKRCSFDPAAGPSVL |
| | | | ALHDEVKKTYKRLCARGKNAARAFPADKTELLALMRHTHE |
| | | | NRVRNQMVRMGRVSEYRGQQAGDLAQSHYWTSAGQTEIK |
| | | | ESEIFVRLWVGAFALAGRSMKAWIDPMGKIVNTEKNDRDLT |
| | | | AAVNIRQVISNKEMVAEAMARRGIYFGETPELDRLGAEGNE |
| | | | GFVFALLRYLRGCRNQTFHLGARAGFLKEIRKELEKTRWGK |
| | | | AKEAEHVVLTDKTVAAIRAIIDNDAKALGARLLADLSGAFV |
| | | | AHYASKEHFSTLYSEIVKAVKDAPEVSSGLPRLKLLLKRADG |
| | | | VRGYVHGLRDTRKHAFATKLPPPPAPRELDDPATKARYIALL |
| | | | RLYDGPFRAYASGITGTALAGPAARAKEAATALAQSVNVTK |
| | | | AYSDVMEGRSSRLRPPNDGETLREYLSALTGETATEFRVQIG |
| | | | YESDSENARKQAEFIENYRRDMLAFMFEDYIRAKGFDWILKI |
| | | | EPGATAMTRAPVLPEPIDTRGQYEHWQAALYLVMHFVPASD |
| | | | VSNLLHQLRKWEALQGKYELVQDGDATDQADARREALDL |
| | | | VKRFRDVLVLFLKTGEARFEGRAAPFDLKPFRALFANPATFD |
| | | | RLFMATPTTARPAEDDPEGDGASEPELRVARTLRGLRQIARY |
| | | | NHMAVLSDLFAKHKVRDEEVARLAEIEDETQEKSQIVAAQE |
| | | | LRTDLHDKVMKCHPKTISPEERQSYAAAIKTIEEHRFLVGRV |
| | | | YLGDHLRLHRLMMDVIGRLIDYAGAYERDTGTFLINASKQL |
| | | | GAGADWAVTIAGAANTDARTQTRKDLAHFNVLDRADGTPD |
| | | | LTALVNRAREMMAYDRKRKNAVPRSILDMLARLGLTLKWQ |
| | | | MKDHLLQDATITQAAIKHLDKVRLTVGGPAAVTEARFSQDY |
| | | | LQMVAAVFNGSVQNPKPRRRDDGDAWHKPPKPATAQSQPD |
| | | | QKPPNKAPSAGSRLPPPQVGEVYEGVVVKVIDTGSLGFLAVE |
| | | | GVAGNIGLHISRLRRIREDAIIVGRRYRFRVEIYVPPKSNTSKL |
| | | | NAADLVRID |
| c2c2-2 | | (SEQ ID | MGNLFGHKRWYEVRDKKDFKIKRKVKVKRNYDGNKYILNI |
| | | No. 79) | NENNNKEKIDNNKFIRKYINYKKNDNILKEFTRKFHAGNILF |
| | | | KLKGKEGIIRIENNDDFLETEEVVLYIEAYGKSEKLKALGITK |
| | | | KKIIDEAIRQGITKDDKKIEIKRQENEEEIEIDIRDEYTNKTLND |
| | | | CSIILRIIENDELETKKSIYEIFKNINMSLYKIIEKIIENETEKVFE |
| | | | NRYYEEHLREKLLKDDKIDVILTNFMEIREKIKSNLEILGFVK |
| | | | FYLNVGGDKKKSKNKKMLVEKILNINVDLTVEDIADFVIKEL |
| | | | EFWNITKRIEKVKKVNNEFLEKRRNRTYIKSYVLLDKHEKFK |
| | | | IERENKKDKIVKFFVENIKNNSIKEKIEKILAEFKIDELIKKLEK |
| | | | ELKKGNCDTEIFGIFKKHYKVNFDSKKFSKKSDEEKELYKIIY |
| | | | RYLKGRIEKILVNEQKVRLKKMEKIEIEKILNESILSEKILKRV |
| | | | KQYTLEHIMYLGKLRHNDIDMTTVNTDDFSRLHAKEELDLE |
| | | | LITFFASTNMELNKIFSRENINNDENIDFFGGDREKNYVLDKK |
| | | | ILNSKIKIIRDLDFIDNKNNITNNFIRKFTKIGTNERNRILHAISK |
| | | | ERDLQGTQDDYNKVINIIQNLKISDEEVSKALNLDVVFKDKK |
| | | | NIITKINDIKISEENNNDIKYLPSFSKVLPEILNLYRNNPKNEPF |
| | | | DTIETEKIVLNALIYVNKELYKKLILEDDLEENESKNIFLQELK |
| | | | KTLGNIDEIDENIIENYYKNAQISASKGNNKAIKKYQKKVIEC |
| | | | YIGYLRKNYEELFDFSDFKMNIQEIKKQIKDINDNKTYERITV |
| | | | KTSDKTIVINDDFEYIISIFALLNSNAVINKIRNRFFATSVWLN |
| | | | TSEYQNIIDILDEIMQLNTLRNECITENWNLNLEEFIQKMKEIE |
| | | | KDFDDFKIQTKKEIFNNYYEDIKNNILTEFKDDINGCDVLEKK |
| | | | LEKIVIFDDETKFEIDKKSNILQDEQRKLSNINKKDLKKKVDQ |
| | | | YIKDKDQEIKSKILCRIIFNSDFLKKYKKEIDNLIEDMESENEN |
| | | | KFQEIYYPKERKNELYIYKKNLFLNIGNPNFDKIYGLISNDIK |
| | | | MADAKFLFNIDGKNIRKNKISEIDAILKNLNDKLNGYSKEYK |
| | | | EKYIKKLKENDDFFAKNIQNKNYKSFEKDYNRVSEYKKIRD |
| | | | LVEFNYLNKIESYLIDINWKLAIQMARFERDMHYIVNGLREL |
| | | | GIIKLSGYNTGISRAYPKRNGSDGFYTTTAYYKFFDEESYKKF |
| | | | EKICYGFGIDLSENSEINKPENESIRNYISHFYIVRNPFADYSIA |
| | | | EQIDRVSNLLSYSTRYNNSTYASVFEVFKKDVNLDYDELKK |
| | | | KFKLIGNNDILERLMKPKKVSVLELESYNSDYIKNLIIELLTKI |
| | | | ENTNDTL |
| c2c2-3 | | L wadei | MKVTKVDGISHKKYIEEGKLVKSTSEENRTSERLSELLSIRLD |
| | | (Lw2) | IYIKNPDNASEEENRIRRENLKKFFSNKVLHLKDSVLYLKNR |
| | | (SEQ ID | KEKNAVQDKNYSEEDISEYDLKNKNSFSVLKKILLNEDVNSE |
| | | No. 80) | ELEIFRKDVEAKLNKINSLKYSFEENKANYQKINENNVEKVG |
| | | | GKSKRNIIYDYYRESAKRNDYINNVQEAFDKLYKKEDIEKLF |
| | | | FLIENSKKHEKYKIREYYHKIIGRKNDKENFAKIIYEEIQNVN |
| | | | NIKELIEKIPDMSELKKSQVFYKYYLDKEELNDKNIKYAFCH |
| | | | FVEIEMSQLLKNYVYKRLSNISNDKIKRIFEYQNLKKLIENKL |
| | | | LNKLDTYVRNCGKYNYYLQVGEIATSDFIARNRQNEAFLRNI |
| | | | IGVSSVAYFSLRNILETENENDITGRMRGKTVKNNKGEEKYV |
| | | | SGEVDKIYNENKQNEVKENLKMFYSYDFNMDNKNEIEDFFA |
| | | | NIDEAISSIRHGIVHFNLELEGKDIFAFKNIAPSEISKKMFQNEI |
| | | | NEKKLKLKIFKQLNSANVFNYYEKDVIIKYLKNTKFNFVNK |
| | | | NIPFVPSFTKLYNKIEDLRNTLKFFWSVPKDKEEKDAQIYLLK |
| | | | NIYYGEFLNKFVKNSKVFFKITNEVIKINKQRNQKTGHYKYQ |
| | | | KFENIEKTVPVEYLAIIQSREMINNQDKEEKNTYIDFIQQIFLK |
| | | | GFIDYLNKNNLKYIESNNNNDNNDIFSKIKIKKDNKEKYDKIL |
| | | | KNYEKHNRNKEIPHEINEFVREIKLGKILKYTENLNMFYLILK |
| | | | LLNHKELTNLKGSLEKYQSANKEETFSDELELINLLNLDNNR |
| | | | VTEDFELEANEIGKFLDFNENKIKDRKELKKFDTNKIYFDGE |
| | | | NIIKHRAFYNIKKYGMLNLLEKIADKAKYKISLKELKEYSNK |
| | | | KNEIEKNYTMQQNLHRKYARPKKDEKFNDEDYKEYEKAIG |
| | | | NIQKYTHLKNKVEFNELNLLQGLLLKILHRLVGYTSIWERDL |
| | | | RFRLKGEFPENHYIEEIFNFDNSKNVKYKSGQIVEKYINFYKE |
| | | | LYKDNVEKRSIYSDKKVKKLKQEKKDLYIRNYIAHFNYIPHA |
| | | | EISLLEVLENLRKLLSYDRKLKNAIMKSIVDILKEYGFVATFK |
| | | | IGADKKIEIQTLESEKIVHLKNLKKKKLMTDRNSEELCELVK |
| | | | VMFEYKALEKRPAATKKAGQAKKKKGSYPYDVPDYAYPY |
| | | | DVPDYAYPYDVPDYA* |
| c2c2-4 | | Listeria | MWISIKTLIHHLGVLFFCDYMYNRREKKIIEVKTMRITKVEV |
| | | seeligeri | DRKKVLISRDKNGGKLVYENEMQDNTEQIMHHKKSSFYKS |
| | | (SEQ ID | VVNKTICRPEQKQMKKLVHGLLQENSQEKIKVSDVTKLNIS |
| | | No. 81) | NFLNHRFKKSLYYFPENSPDKSEEYRIEINLSQLLEDSLKKQQ |
| | | | GTFICWESFSKDMELYINWAENYISSKTKLIKKSIRNNRIQST |
| | | | ESRSGQLMDRYMKDILNKNKPFDIQSVSEKYQLEKLTSALK |
| | | | ATFKEAKKNDKEINYKLKSTLQNHERQIIEELKENSELNQFNI |
| | | | EIRKHLETYFPIKKTNRKVGDIRNLEIGEIQKIVNHRLKNKIVQ |
| | | | RILQEGKLASYEIESTVNSNSLQKIKIEEAFALKFINACLFASN |
| | | | NLRNMVYPVCKKDILMIGEFKNSFKEIKHKKFIRQWSQFFSQ |
| | | | EITVDDIELASWGLRGAIAPIRNEIIHLKKHSWKKFFNNPTFK |
| | | | VKKSKIINGKTKDVTSEFLYKETLFKDYFYSELDSVPELIINK |
| | | | MESSKILDYYSSDQLNQVFTIPNFELSLLTSAVPFAPSFKRVY |
| | | | LKGFDYQNQDEAQPDYNLKLNIYNEKAFNSEAFQAQYSLFK |
| | | | MVYYQVFLPQFTTNNDLFKSSVDFILTLNKERKGYAKAFQDI |
| | | | RKMNKDEKPSEYMSYIQSQLMLYQKKQEEKEKINHFEKFIN |
| | | | QVFIKGFNSFIEKNRLTYICHPTKNTVPENDNIEIPFHTDMDDS |
| | | | NIAFWLMCKLLDAKQLSELRNEMIKFSCSLQSTEEISTFTKAR |
| | | | EVIGLALLNGEKGCNDWKELFDDKEAWKKNMSLYVSEELL |
| | | | QSLPYTQEDGQTPVINRSIDLVKKYGTETILEKLFSSSDDYKV |
| | | | SAKDIAKLHEYDVTEKIAQQESLHKQWIEKPGLARDSAWTK |
| | | | KYQNVINDISNYQWAKTKVELTQVRHLHQLTIDLLSRLAGY |
| | | | MSIADRDFQFSSNYILERENSEYRVTSWILLSENKNKNKYND |
| | | | YELYNLKNASIKVSSKNDPQLKVDLKQLRLTLEYLELFDNRL |
| | | | KEKRNNISHFNYLNGQLGNSILELFDDARDVLSYDRKLKNA |
| | | | VSKSLKEILSSHGMEVTFKPLYQTNHHLKIDKLQPKKIHHLG |
| | | | EKSTVSSNQVSNEYCQLVRTLLTMK |
| C2-17 | | Leptotrichia | MKVTKVGGISHKKYTSEGRLVKSESEENRTDERLSALLNMR |
| | | buccalis | LDMYIKNPSSTETKENQKRIGKLKKFFSNKMVYLKDNTLSL |
| | | C-1013-b | KNGKKENIDREYSETDILESDVRDKKNFAVLKKIYLNENVNS |
| | | (SEQ ID | EELEVFRNDIKKKLNKINSLKYSFEKNKANYQKINENNIEKV |
| | | No. 82) | EGKSKRNIIYDYYRESAKRDAYVSNVKEAFDKLYKEEDIAK |
| | | | LVLEIENLTKLEKYKIREFYHEIIGRKNDKENFAKIIYEEIQNV |
| | | | NNMKELIEKVPDMSELKKSQVFYKYYLDKEELNDKNIKYAF |
| | | | CHFVEIEMSQLLKNYVYKRLSNISNDKIKRIFEYQNLKKLIEN |
| | | | KLLNKLDTYVRNCGKYNYYLQDGEIATSDFIARNRQNEAFL |
| | | | RNIIGVSSVAYFSLRNILETENENDITGRMRGKTVKNNKGEE |
| | | | KYVSGEVDKIYNENKKNEVKENLKMFYSYDFNMDNKNEIE |
| | | | DFFANIDEAISSIRHGIVHFNLELEGKDIFAFKNIAPSEISKKMF |
| | | | QNEINEKKLKLKIFRQLNSANVFRYLEKYKILNYLKRTRFEF |
| | | | VNKNIPFVPSFTKLYSRIDDLKNSLGIYWKTPKTNDDNKTKEI |
| | | | IDAQIYLLKNIYYGEFLNYFMSNNGNFFEISKEIIELNKNDKR |
| | | | NLKTGFYKLQKFEDIQEKIPKEYLANIQSLYMINAGNQDEEE |
| | | | KDTYIDFIQKIFLKGFMTYLANNGRLSLIYIGSDEETNTSLAE |
| | | | KKQEFDKFLKKYEQNNNIKIPYEINEFLREIKLGNILKYTERL |
| | | | NMFYLILKLLNHKELTNLKGSLEKYQSANKEEAFSDQLELIN |
| | | | LLNLDNNRVTEDFELEADEIGKFLDFNGNKVKDNKELKKFD |
| | | | TNKIYFDGENIIKHRAFYNIKKYGMLNLLEKIADKAGYKISIE |
| | | | ELKKYSNKKNEIEKNHKMQENLHRKYARPRKDEKFTDEDY |
| | | | ESYKQAIENIEEYTHLKNKVEFNELNLLQGLLLRILHRLVGY |
| | | | TSIWERDLRFRLKGEFPENQYIEEIFNFENKKNVKYKGGQIVE |
| | | | KYIKFYKELHQNDEVKINKYSSANIKVLKQEKKDLYIRNYIA |
| | | | HFNYIPHAEISLLEVLENLRKLLSYDRKLKNAVMKSVVDILK |
| | | | EYGFVATFKIGADKKIGIQTLESEKIVHLKNLKKKKLMTDRN |
| | | | SEELCKLVKIMFEYKMEEKKSEN |
| C2-18 | | Herbinix | MKLTRRRISGNSVDQKITAAFYRDMSQGLLYYDSEDNDCTD |
| | | hemicell- | KVIESMDFERSWRGRILKNGEDDKNPFYMFVKGLVGSNDKI |
| | | ulosilytica | VCEPIDVDSDPDNLDILINKNLTGFGRNLKAPDSNDTLENLIR |
| | | (SEQ ID | KIQAGIPEEEVLPELKKIKEMIQKDIVNRKEQLLKSIKNNRIPF |
| | | No. 83) | SLEGSKLVPSTKKMKWLFKLIDVPNKTFNEKMLEKYWEIYD |
| | | | YDKLKANITNRLDKTDKKARSISRAVSEELREYHKNLRTNY |
| | | | NRFVSGDRPAAGLDNGGSAKYNPDKEEFLLFLKEVEQYFKK |
| | | | YFPVKSKHSNKSKDKSLVDKYKNYCSYKVVKKEVNRSIINQ |
| | | | LVAGLIQQGKLLYYFYYNDTWQEDFLNSYGLSYIQVEEAFK |
| | | | KSVMTSLSWGINRLTSFFIDDSNTVKFDDITTKKAKEAIESNY |
| | | | FNKLRTCSRMQDHFKEKLAFFYPVYVKDKKDRPDDDIENLI |
| | | | VLVKNAIESVSYLRNRTFHFKESSLLELLKELDDKNSGQNKI |
| | | | DYSVAAEFIKRDIENLYDVFREQIRSLGIAEYYKADMISDCFK |
| | | | TCGLEFALYSPKNSLMPAFKNVYKRGANLNKAYIRDKGPKE |
| | | | TGDQGQNSYKALEEYRELTWYIEVKNNDQSYNAYKNLLQLI |
| | | | YYHAFLPEVRENEALITDFINRTKEWNRKETEERLNTKNNKK |
| | | | HKNFDENDDITVNTYRYESIPDYQGESLDDYLKVLQRKQMA |
| | | | RAKEVNEKEEGNNNYIQFIRDVVVWAFGAYLENKLKNYKN |
| | | | ELQPPLSKENIGLNDTLKELFPEEKVKSPFNIKCRFSISTFIDNK |
| | | | GKSTDNTSAEAVKTDGKEDEKDKKNIKRKDLLCFYLFLRLL |
| | | | DENEICKLQHQFIKYRCSLKERRFPGNRTKLEKETELLAELEE |
| | | | LMELVRFTMPSIPEISAKAESGYDTMIKKYFKDFIEKKVFKNP |
| | | | KTSNLYYHSDSKTPVTRKYMALLMRSAPLHLYKDIFKGYYL |
| | | | ITKKECLEYIKLSNIIKDYQNSLNELHEQLERIKLKSEKQNGK |
| | | | DSLYLDKKDFYKVKEYVENLEQVARYKHLQHKINFESLYRI |
| | | | FRIHVDIAARMVGYTQDWERDMHFLFKALVYNGVLEERRF |
| | | | EAIFNNNDDNNDGRIVKKIQNNLNNKNRELVSMLCWNKKL |
| | | | NKNEFGAIIWKRNPIAHLNHFTQTEQNSKSSLESLINSLRILLA |
| | | | YDRKRQNAVTKTINDLLLNDYHIRIKWEGRVDEGQIYFNIKE |
| | | | KEDIENEPIIHLKHLHKKDCYIYKNSYMFDKQKEWICNGIKE |
| | | | EVYDKSILKCIGNLFKFDYEDKNKSSANPKHT |
| C2-19 | | [Eubacterium] | MLRRDKEVKKLYNVFNQIQVGTKPKKWNNDEKLSPEENER |
| | | rectale | RAQQKNIKMKNYKWREACSKYVESSQRIINDVIFYSYRKAK |
| | | (SEQ ID | NKLRYMRKNEDILKKMQEAEKLSKFSGGKLEDFVAYTLRKS |
| | | No. 84) | LVVSKYDTQEFDSLAAMVVFLECIGKNNISDHEREIVCKLLE |
| | | | LIRKDFSKLDPNVKGSQGANIVRSVRNQNMIVQPQGDRFLFP |
| | | | QVYAKENETVTNKNVEKEGLNEFLLNYANLDDEKRAESLR |
| | | | KLRRILDVYFSAPNHYEKDMDITLSDNIEKEKFNVWEKHEC |
| | | | GKKETGLFVDIPDVLMEAEAENIKLDAVVEKRERKVLNDRV |
| | | | RKQNIICYRYTRAVVEKYNSNEPLFFENNAINQYWIHHIENA |
| | | | VERILKNCKAGKLFKLRKGYLAEKVWKDAINLISIKYIALGK |
| | | | AVYNFALDDIWKDKKNKELGIVDERIRNGITSFDYEMIKAHE |
| | | | NLQRELAVDIAFSVNNLARAVCDMSNLGNKESDFLLWKRN |
| | | | DIADKLKNKDDMASVSAVLQFFGGKSSWDINIFKDAYKGKK |
| | | | KYNYEVRFIDDLRKAIYCARNENFHFKTALVNDEKWNTELF |
| | | | GKIFERETEFCLNVEKDRFYSNNLYMFYQVSELRNMLDHLY |
| | | | SRSVSRAAQVPSYNSVIVRTAFPEYITNVLGYQKPSYDADTL |
| | | | GKWYSACYYLLKEIYYNSFLQSDRALQLFEKSVKTLSWDDK |
| | | | KQQRAVDNFKDHFSDIKSACTSLAQVCQIYMTEYNQQNNQI |
| | | | KKVRSSNDSIFDQPVYQHYKVLLKKAIANAFADYLKNNKDL |
| | | | FGFIGKPFKANEIREIDKEQFLPDWTSRKYEALCIEVSGSQEL |
| | | | QKWYIVGKFLNARSLNLMVGSMRSYIQYVTDIKRRAASIGN |
| | | | ELHVSVHDVEKVEKWVQVIEVCSLLASRTSNQFEDYFNDKD |
| | | | DYARYLKSYVDFSNVDMPSEYSALVDFSNEEQSDLYVDPKN |
| | | | PKVNRNIVHSKLFAADHILRDIVEPVSKDNIEEFYSQKAEIAY |
| | | | CKIKGKEITAEEQKAVLKYQKLKNRVELRDIVEYGEIINELLG |
| | | | QLINWSFMRERDLLYFQLGFHYDCLRNDSKKPEGYKNIKVD |
| | | | ENSIKDAILYQIIGMYVNGVTVYAPEKDGDKLKEQCVKGGV |
| | | | GVKVSAFHRYSKYLGLNEKTLYNAGLEIFEVVAEHEDIINLR |
| | | | NGIDHFKYYLGDYRSMLSIYSEVFDRFFTYDIKYQKNVLNLL |
| | | | QNILLRHNVIVEPILESGFKTIGEQTKPGAKLSIRSIKSDTFQY |
| | | | KVKGGTLITDAKDERYLETIRKILYYAENEEDNLKKSVVVTN |
| | | | ADKYEKNKESDDQNKQKEKKNKDNKGKKNEETKSDAEKN |
| | | | NNERLSYNPFANLNFKLSN |
| C2-20 | | Eubacteriaceae | MKISKESHKRTAVAVMEDRVGGVVYVPGGSGIDLSNNLKK |
| | | bacterium | RSMDTKSLYNVFNQIQAGTAPSEYEWKDYLSEAENKKREAQ |
| | | CHKCI004 | KMIQKANYELRRECEDYAKKANLAVSRIIFSKKPKKIFSDDDI |
| | | (SEQ ID | ISHMKKQRLSKFKGRMEDFVLIALRKSLVVSTYNQEVFDSR |
| | | No. 85) | KAATVFLKNIGKKNISADDERQIKQLMALIREDYDKWNPDK |
| | | | DSSDKKESSGTKVIRSIEHQNMVIQPEKNKLSLSKISNVGKKT |
| | | | KTKQKEKAGLDAFLKEYAQIDENSRMEYLKKLRRLLDTYFA |
| | | | APSSYIKGAAVSLPENINFSSELNVWERHEAAKKVNINFVEIP |
| | | | ESLLNAEQNNNKINKVEQEHSLEQLRTDIRRRNITCYHFANA |
| | | | LAADERYHTLFFENMAMNQFWIHHMENAVERILKKCNVGT |
| | | | LFKLRIGYLSEKVWKDMLNLLSIKYIALGKAVYHFALDDIW |
| | | | KADIWKDASDKNSGKINDLTLKGISSFDYEMVKAQEDLQRE |
| | | | MAVGVAFSTNNLARVTCKMDDLSDAESDFLLWNKEAIRRH |
| | | | VKYTEKGEILSAILQFFGGRSLWDESLFEKAYSDSNYELKFL |
| | | | DDLKRAIYAARNETFHFKTAAIDGGSWNTRLFGSLFEKEAGL |
| | | | CLNVEKNKFYSNNLVLFYKQEDLRVFLDKLYGKECSRAAQI |
| | | | PSYNTILPRKSFSDFMKQLLGLKEPVYGSAILDQWYSACYYL |
| | | | FKEVYYNLFLQDSSAKALFEKAVKALKGADKKQEKAVESFR |
| | | | KRYWEISKNASLAEICQSYITEYNQQNNKERKVRSANDGMF |
| | | | NEPIYQHYKMLLKEALKMAFASYIKNDKELKFVYKPTEKLF |
| | | | EVSQDNFLPNWNSEKYNTLISEVKNSPDLQKWYIVGKFMNA |
| | | | RMLNLLLGSMRSYLQYVSDIQKRAAGLGENQLHLSAENVG |
| | | | QVKKWIQVLEVCLLLSVRISDKFTDYFKDEEEYASYLKEYV |
| | | | DFEDSAMPSDYSALLAFSNEGKIDLYVDASNPKVNRNIIQAK |
| | | | LYAPDMVLKKVVKKISQDECKEFNEKKEQIMQFKNKGDEVS |
| | | | WEEQQKILEYQKLKNRVELRDLSEYGELINELLGQLINWSYL |
| | | | RERDLLYFQLGFHYSCLMNESKKPDAYKTIRRGTVSIENAVL |
| | | | YQIIAMYINGFPVYAPEKGELKPQCKTGSAGQKIRAFCQWAS |
| | | | MVEKKKYELYNAGLELFEVVKEHDNIIDLRNKIDHFKYYQG |
| | | | NDSILALYGEIFDRFFTYDMKYRNNVLNHLQNILLRHNVIIKP |
| | | | IISKDKKEVGRGKMKDRAAFLLEEVSSDRFTYKVKEGERKID |
| | | | AKNRLYLETVRDILYFPNRAVNDKGEDVIICSKKAQDLNEK |
| | | | KADRDKNHDKSKDTNQKKEGKNQEEKSENKEPYSDRMTW |
| | | | KPFAGIKLE |
| C2-21 | | Blautia sp. | MKISKVDHVKSGIDQKLSSQRGMLYKQPQKKYEGKQLEEH |
| | | Marseille- | VRNLSRKAKALYQVFPVSGNSKMEKELQIINSFIKNILLRLDS |
| | | P2398 | GKTSEEIVGYINTYSVASQISGDHIQELVDQHLKESLRKYTCV |
| | | (SEQ ID | GDKRIYVPDIIVALLKSKFNSETLQYDNSELKILIDFIREDYLK |
| | | No. 86) | EKQIKQIVHSIENNSTPLRIAEINGQKRLIPANVDNPKKSYIFE |
| | | | FLKEYAQSDPKGQESLLQHMRYLILLYLYGPDKITDDYCEEI |
| | | | EAWNFGSIVMDNEQLFSEEASMLIQDRIYVNQQIEEGRQSKD |
| | | | TAKVKKNKSKYRMLGDKIEHSINESVVKHYQEACKAVEEK |
| | | | DIPWIKYISDHVMSVYSSKNRVDLDKLSLPYLAKNTWNTWI |
| | | | SFIAMKYVDMGKGVYHFAMSDVDKVGKQDNLIIGQIDPKFS |
| | | | DGISSFDYERIKAEDDLHRSMSGYIAFAVNNFARAICSDEFRK |
| | | | KNRKEDVLTVGLDEIPLYDNVKRKLLQYFGGASNWDDSIIDI |
| | | | IDDKDLVACIKENLYVARNVNFHFAGSEKVQKKQDDILEEIV |
| | | | RKETRDIGKHYRKVFYSNNVAVFYCDEDIIKLMNHLYQREK |
| | | | PYQAQIPSYNKVISKTYLPDLIFMLLKGKNRTKISDPSIMNMF |
| | | | RGTFYFLLKEIYYNDFLQASNLKEMFCEGLKNNVKNKKSEK |
| | | | PYQNFMRRFEELENMGMDFGEICQQIMTDYEQQNKQKKKT |
| | | | ATAVMSEKDKKIRTLDNDTQKYKHFRTLLYIGLREAFIIYLK |
| | | | DEKNKEWYEFLREPVKREQPEEKEFVNKWKLNQYSDCSELI |
| | | | LKDSLAAAWYVVAHFINQAQLNHLIGDIKNYIQFISDIDRRA |
| | | | KSTGNPVSESTEIQIERYRKILRVLEFAKFFCGQITNVLTDYY |
| | | | QDENDFSTHVGHYVKFEKKNMEPAHALQAFSNSLYACGKE |
| | | | KKKAGFYYDGMNPIVNRNITLASMYGNKKLLENAMNPVTE |
| | | | QDIRKYYSLMAELDSVLKNGAVCKSEDEQKNLRHFQNLKN |
| | | | RIELVDVLTLSELVNDLVAQLIGWVYIRERDMMYLQLGLHY |
| | | | IKLYFTDSVAEDSYLRTLDLEEGSIADGAVLYQIASLYSFNLP |
| | | | MYVKPNKSSVYCKKHVNSVATKFDIFEKEYCNGDETVIENG |
| | | | LRLFENINLHKDMVKFRDYLAHFKYFAKLDESILELYSKAYD |
| | | | FFFSYNIKLKKSVSYVLTNVLLSYFINAKLSFSTYKSSGNKTV |
| | | | QHRTTKISVVAQTDYFTYKLRSIVKNKNGVESIENDDRRCEV |
| | | | VNIAARDKEFVDEVCNVINYNSDK |
| C2-22 | | Leptotrichia | MGNLFGHKRWYEVRDKKDFKIKRKVKVKRNYDGNKYILNI |
| | | sp. oral | NENNNKEKIDNNKFIGEFVNYKKNNNVLKEFKRKFHAGNIL |
| | | taxon 879 | FKLKGKEEIIRIENNDDFLETEEVVLYIEVYGKSEKLKALEITK |
| | | str. F0557 | KKIIDEAIRQGITKDDKKIEIKRQENEEEIEIDIRDEYTNKTLND |
| | | (SEQ ID | CSIILRIIENDELETKKSIYEIFKNINMSLYKIIEKIIENETEKVFE |
| | | No. 87) | NRYYEEHLREKLLKDNKIDVILTNFMEIREKIKSNLEIMGFVK |
| | | | FYLNVSGDKKKSENKKMFVEKILNTNVDLTVEDIVDFIVKEL |
| | | | KFWNITKRIEKVKKFNNEFLENRRNRTYIKSYVLLDKHEKFK |
| | | | IERENKKDKIVKFFVENIKNNSIKEKIEKILAEFKINELIKKLEK |
| | | | ELKKGNCDTEIFGIFKKHYKVNFDSKKFSNKSDEEKELYKIIY |
| | | | RYLKGRIEKILVNEQKVRLKKMEKIEIEKILNESILSEKILKRV |
| | | | KQYTLEHIMYLGKLRHNDIVKMTVNTDDFSRLHAKEELDLE |
| | | | LITFFASTNMELNKIFNGKEKVTDFFGFNLNGQKITLKEKVPS |
| | | | FKLNILKKLNFINNENNIDEKLSHFYSFQKEGYLLRNKILHNS |
| | | | YGNIQETKNLKGEYENVEKLIKELKVSDEEISKSLSLDVIFEG |
| | | | KVDIINKINSLKIGEYKDKKYLPSFSKIVLEITRKFREINKDKL |
| | | | FDIESEKIILNAVKYVNKILYEKITSNEENEFLKTLPDKLVKKS |
| | | | NNKKENKNLLSIEEYYKNAQVSSSKGDKKAIKKYQNKVTNA |
| | | | YLEYLENTFTEIIDFSKFNLNYDEIKTKIEERKDNKSKIIIDSIST |
| | | | NINITNDIEYIISIFALLNSNTYINKIRNRFFATSVWLEKQNGTK |
| | | | EYDYENIISILDEVLLINLLRENNITDILDLKNAIIDAKIVENDE |
| | | | TYIKNYIFESNEEKLKKRLFCEELVDKEDIRKIFEDENFKFKSF |
| | | | IKKNEIGNFKINFGILSNLECNSEVEAKKIIGKNSKKLESFIQNI |
| | | | IDEYKSNIRTLFSSEFLEKYKEEIDNLVEDTESENKNKFEKIYY |
| | | | PKEHKNELYIYKKNLFLNIGNPNFDKIYGLISKDIKNVDTKIL |
| | | | FDDDIKKNKISEIDAILKNLNDKLNGYSNDYKAKYVNKLKE |
| | | | NDDFFAKNIQNENYSSFGEFEKDYNKVSEYKKIRDLVEFNYL |
| | | | NKIESYLIDINWKLAIQMARFERDMHYIVNGLRELGIIKLSGY |
| | | | NTGISRAYPKRNGSDGFYTTTAYYKFFDEESYKKFEKICYGF |
| | | | GIDLSENSEINKPENESIRNYISHFYIVRNPFADYSIAEQIDRVS |
| | | | NLLSYSTRYNNSTYASVFEVFKKDVNLDYDELKKKFRLIGN |
| | | | NDILERLMKPKKVSVLELESYNSDYIKNLIIELLTKIENTNDTL |
| C2-23 | | Lachno- | MKISKVDHTRMAVAKGNQHRRDEISGILYKDPTKTGSIDFDE |
| | | spiraceae | RFKKLNCSAKILYHVFNGIAEGSNKYKNIVDKVNNNLDRVL |
| | | bacterium | FTGKSYDRKSIIDIDTVLRNVEKINAFDRISTEEREQIIDDLLEI |
| | | NK4A144 | QLRKGLRKGKAGLREVLLIGAGVIVRTDKKQEIADFLEILDE |
| | | (SEQ ID | DFNKTNQAKNIKLSIENQGLVVSPVSRGEERIFDVSGAQKGK |
| | | No. 88) | SSKKAQEKEALSAFLLDYADLDKNVRFEYLRKIRRLINLYFY |
| | | | VKNDDVMSLTEIPAEVNLEKDFDIWRDHEQRKEENGDFVGC |
| | | | PDILLADRDVKKSNSKQVKIAERQLRESIREKNIKRYRFSIKTI |
| | | | EKDDGTYFFANKQISVFWIHRIENAVERILGSINDKKLYRLRL |
| | | | GYLGEKVWKDILNFLSIKYIAVGKAVFNFAMDDLQEKDRDI |
| | | | EPGKISENAVNGLTSFDYEQIKADEMLQREVAVNVAFAANN |
| | | | LARVTVDIPQNGEKEDILLWNKSDIKKYKKNSKKGILKSILQ |
| | | | FFGGASTWNMKMFEIAYHDQPGDYEENYLYDIIQIIYSLRNK |
| | | | SFHFKTYDHGDKNWNRELIGKMIEHDAERVISVEREKFHSN |
| | | | NLPMFYKDADLKKILDLLYSDYAGRASQVPAFNTVLVRKNF |
| | | | PEFLRKDMGYKVHFNNPEVENQWHSAVYYLYKEIYYNLFL |
| | | | RDKEVKNLFYTSLKNIRSEVSDKKQKLASDDFASRCEEIEDR |
| | | | SLPEICQIIMTEYNAQNFGNRKVKSQRVIEKNKDIFRHYKML |
| | | | LIKTLAGAFSLYLKQERFAFIGKATPIPYETTDVKNFLPEWKS |
| | | | GMYASFVEEIKNNLDLQEWYIVGRFLNGRMLNQLAGSLRSY |
| | | | IQYAEDIERRAAENRNKLFSKPDEKIEACKKAVRVLDLCIKIS |
| | | | TRISAEFTDYFDSEDDYADYLEKYLKYQDDAIKELSGSSYAA |
| | | | LDHFCNKDDLKFDIYVNAGQKPILQRNIVMAKLFGPDNILSE |
| | | | VMEKVTESAIREYYDYLKKVSGYRVRGKCSTEKEQEDLLKF |
| | | | QRLKNAVEFRDVTEYAEVINELLGQLISWSYLRERDLLYFQL |
| | | | GFHYMCLKNKSFKPAEYVDIRRNNGTIIHNAILYQIVSMYIN |
| | | | GLDFYSCDKEGKTLKPIETGKGVGSKIGQFIKYSQYLYNDPS |
| | | | YKLEIYNAGLEVFENIDEHDNITDLRKYVDHFKYYAYGNKM |
| | | | SLLDLYSEFFDRFFTYDMKYQKNVVNVLENILLRHFVIFYPK |
| | | | FGSGKKDVGIRDCKKERAQIEISEQSLTSEDFMFKLDDKAGE |
| | | | EAKKFPARDERYLQTIAKLLYYPNEIEDMNRFMKKGETINK |
| | | | KVQFNRKKKITRKQKNNSSNEVLSSTMGYLFKNIKL |
| C2-24 | | Chloroflexus | MTDQVRREEVAAGELADTPLAAAQTPAADAAVAATPAPAE |
| | | aggregans | AVAPTPEQAVDQPATTGESEAPVTTAQAAAHEAEPAEATGA |
| | | (SEQ ID | SFTPVSEQQPQKPRRLKDLQPGMELEGKVTSIALYGIFVDVG |
| | | No. 89) | VGRDGLVHISEMSDRRIDTPSELVQIGDTVKVWVKSVDLDA |
| | | | RRISLTMLNPSRGEKPRRSRQSQPAQPQPRRQEVDREKLASL |
| | | | KVGEIVEGVITGFAPFGAFADIGVGKDGLIHISELSEGRVEKP |
| | | | EDAVKVGERYQFKVLEIDGEGTRISLSLRRAQRTQRMQQLEP |
| | | | GQIIEGTVSGIATFGAFVDIGVGRDGLVHISALAPHRVAKVED |
| | | | VVKVGDKVKVKVLGVDPQSKRISLTMRLEEEQPATTAGDEA |
| | | | AEPAEEVTPTRRGNLERFAAAAQTARERSERGERSERGERRE |
| | | | RRERRPAQSSPDTYIVGEDDDESFEGNATIEDLLTKFGGSSSR |
| | | | RDRDRRRRHEDDDDEEMERPSNRRQREAIRRTLQQIGYDE |
| C2-25 | | Demequina | MDLTWHALLILFIVALLAGFLDTLAGGGGLLTVPALLLTGIP |
| | | aurantiaca | PLQALGTNKLQSSFGTGMATYQVIRKKRVHWRDVRWPMV |
| | | (SEQ ID | WAFLGSAAGAVAVQFIDTDALLIIIPVVLALVAAYFLFVPKS |
| | | No. 90) | HLPPPEPRMSDPAYEATLVPIIGAYDGAFGPGTGSLYALSGV |
| | | | ALRAKTLVQSTAIAKTLNFATNFAALLVFAFAGHMLWTVGA |
| | | | VMIAGQLIGAYAGSHMLFRVNPLVLRVLIVVMSLGMLIRVL |
| | | | LD |
| C2-26 | | Thalassospira | MRIIKPYGRSHVEGVATQEPRRKLRLNSSPDISRDIPGFAQSH |
| | | sp. | DALIIAQWISAIDKIATKPKPDKKPTQAQINLRTTLGDAAWQ |
| | | TSL5-1 | HVMAENLLPAATDPAIREKLHLIWQSKIAPWGTARPQAEKD |
| | | (SEQ ID | GKPTPKGGWYERFCGVLSPEAITQNVARQIAKDIYDHLHVA |
| | | No. 91) | AKRKGREPAKQGESSNKPGKFKPDRKRGLIEERAESIAKNAL |
| | | | RPGSHAPCPWGPDDQATYEQAGDVAGQIYAAARDCLEEKK |
| | | | RRSGNRNTSSVQYLPRDLAAKILYAQYGRVFGPDTTIKAALD |
| | | | EQPSLFALHKAIKDCYHRLINDARKRDILRILPRNMAALFRL |
| | | | VRAQYDNRDINALIRLGKVIHYHASEQGKSEHHGIRDYWPS |
| | | | QQDIQNSRFWGSDGQADIKRHEAFSRIWRHIIALASRTLHDW |
| | | | ADPHSQKFSGENDDILLLAKDAIEDDVFKAGHYERKCDVLF |
| | | | GAQASLFCGAEDFEKAILKQAITGTGNLRNATFHFKGKVRFE |
| | | | KELQELTKDVPVEVQSAIAALWQKDAEGRTRQIAETLQAVL |
| | | | AGHFLTEEQNRHIFAALTAAMAQPGDVPLPRLRRVLARHDSI |
| | | | CQRGRILPLSPCPDRAKLEESPALTCQYTVLKMLYDGPFRAW |
| | | | LAQQNSTILNHYIDSTIARTDKAARDMNGRKLAQAEKDLITS |
| | | | RAADLPRLSVDEKMGDFLARLTAATATEMRVQRGYQSDGE |
| | | | NAQKQAAFIGQFECDVIGRAFADFLNQSGFDFVLKLKADTP |
| | | | QPDAAQCDVTALIAPDDISVSPPQAWQQVLYFILHLVPVDDA |
| | | | SHLLHQIRKWQVLEGKEKPAQIAHDVQSVLMLYLDMHDAK |
| | | | FTGGAALHGIEKFAEFFAHAADFRAVFPPQSLQDQDRSIPRR |
| | | | GLREIVRFGULPLLQHMSGTVQITHDNVVAWQAARTAGAT |
| | | | GMSPIARRQKQREELHALAVERTARFRNADLQNYMHALVD |
| | | | VIKHRQLSAQVTLSDQVRLHRLMMGVLGRLVDYAGLWERD |
| | | | LYFVVLALLYHHGATPDDVFKGQGKKNLADGQVVAALKPK |
| | | | NRKAAAPVGVFDDLDHYGIYQDDRQSIRNGLSHFNMLRGG |
| | | | KAPDLSHWVNQTRSLVAHDRKLKNAVAKSVIEMLAREGFD |
| | | | LDWGIQTDRGQHILSHGKIRTRQAQHFQKSRLHIVKKSAKPD |
| | | | KNDTVKIRENLHGDAMVERVVQLFAAQVQKRYDITVEKRL |
| | | | DHLFLKPQDQKGKNGIHTHNGWSKTEKKRRPSRENRKGNH |
| | | | EN |
| C2-27 | | SAMN04487830_ | MKFSKESHRKTAVGVTESNGIIGLLYKDPLNEKEKIEDVVNQ |
| | | 13920 | RANSTKRLFNLFGTEATSKDISRASKDLAKVVNKAIGNLKGN |
| | | [Pseudo- | KKFNKKEQITKGLNTKIIVEELKNVLKDEKKLIVNKDIIDEAC |
| | | butyrivibrio | SRLLKTSFRTAKTKQAVKMILTAVLIENTNLSKEDEAFVHEY |
| | | sp. OR37] | FVKKLVNEYNKTSVKKQIPVALSNQNMVIQPNSVNGTLEISE |
| | | (SEQ ID | TKKSKETKTTEKDAFRAFLRDYATLDENRRHKMRLCLRNLV |
| | | No. 92) | NLYFYGETSVSKDDFDEWRDHEDKKQNDELFVKKIVSIKTD |
| | | | RKGNVKEVLDVDATIDAIRTNNIACYRRALAYANENPDVFF |
| | | | SDTMLNKFWIHHVENEVERIYGHINNNTGDYKYQLGYLSEK |
| | | | VWKGIINYLSIKYIAEGKAVYNYAMNALAKDNNSNAFGKLD |
| | | | EKFVNGITSFEYERIKAEETLQRECAVNIAFAANHLANATVD |
| | | | LNEKDSDFLLLKHEDNKDTLGAVARPNILRNILQFFGGKSRW |
| | | | NDFDFSGIDEIQLLDDLRKMIYSLRNSSFHFKTENIDNDSWNT |
| | | | KLIGDMFAYDFNMAGNVQKDKMYSNNVPMFYSTSDIEKML |
| | | | DRLYAEVHERASQVPSFNSVFVRKNFPDYLKNDLKITSAFGV |
| | | | DDALKWQSAVYYVCKEIYYNDFLQNPETFTMLKDYVQCLPI |
| | | | DIDKSMDQKLKSERNAHKNFKEAFATYCKECDSLSAICQMI |
| | | | MTEYNNQNKGNRKVISARTKDGDKLIYKHYKMILFEALKN |
| | | | VFTIYLEKNINTYGFLKKPKLINNVPAIEEFLPNYNGRQYETL |
| | | | VNRITEETELQKWYIVGRLLNPKQVNQLIGNFRSYVQYVND |
| | | | VARRAKQTGNNLSNDNIAWDVKNIIQIFDVCTKLNGVTSNIL |
| | | | EDYFDDGDDYARYLKNFVDYTNKNNDHSATLLGDFCAKEI |
| | | | DGIKIGIYHDGTNPIVNRNIIQCKLYGATGIISDLTKDGSILSV |
| | | | DYEIIKKYMQMQKEIKVYQQKGICKTKEEQQNLKKYQELKN |
| | | | IVELRNIIDYSEILDELQGQLINWGYLRERDLMYFQLGFHYLC |
| | | | LHNESKKPVGYNNAGDISGAVLYQIVAMYTNGLSLIDANGK |
| | | | SKKNAKASAGAKVGSFCSYSKEIRGVDKDTKEDDDPIYLAG |
| | | | VELFENINEHQQCINLRNYIEHFHYYAKHDRSMLDLYSEVFD |
| | | | RFFTYDMKYTKNVPNMMYNILLQHLVVPAFEFGSSEKRLDD |
| | | | NDEQTKPRAMFTLREKNGLSSEQFTYRLGDGNSTVKLSARG |
| | | | DDYLRAVASLLYYPDRAPEGLIRDAEAEDKFAKINHSNPKSD |
| | | | NRNNRGNFKNPKVQWYNNKTKRK |
| C2-28 | | SAMN02910398_ | MKISKVDHRKTAVKITDNKGAEGFIYQDPTRDSSTMEQIISN |
| | | 00008 | RARSSKVLFNIFGDTKKSKDLNKYTESLIIYVNKAIKSLKGDK |
| | | [Butyrivibrio | RNNKYEEITESLKTERVLNALIQAGNEFTCSENNIEDALNKY |
| | | sp. | LKKSFRVGNTKSALKKLLMAAYCGYKLSIEEKEEIQNYFVD |
| | | YAB3001] | KLVKEYNKDTVLKYTAKSLKHQNMVVQPDTDNHVFLPSRI |
| | | (SEQ ID | AGATQNKMSEKEALTEFLKAYAVLDEEKRHNLRIILRKLVN |
| | | No. 93) | LYFYESPDFIYPENNEWKEHDDRKNKTETFVSPVKVNEEKN |
| | | | GKTFVKIDVPATKDLIRLKNIECYRRSVAETAGNPITYFTDHN |
| | | | ISKFWIHHIENEVEKIFALLKSNWKDYQFSVGYISEKVWKEII |
| | | | NYLSIKYIAIGKAVYNYALEDIKKNDGTLNFGVIDPSFYDGIN |
| | | | SFEYEKIKAEETFQREVAVYVSFAVNHLSSATVKLSEAQSDM |
| | | | LVLNKNDIEKIAYGNTKRNILQFFGGQSKWKEFDFDRYINPV |
| | | | NYTDIDFLFDIKKMVYSLRNESFHFTTTDTESDWNKNLISAM |
| | | | FEYECRRISTVQKNKFFSNNLPLFYGENSLERVLHKLYDDYV |
| | | | DRMSQVPSFGNVFVRKKFPDYMKEIGIKHNLSSEDNLKLQG |
| | | | ALYFLYKEIYYNAFISSEKAMKIFVDLVNKLDTNARDDKGRI |
| | | | THEAMAHKNFKDAISHYMTHDCSLADICQKIMTEYNQQNT |
| | | | GHRKKQTTYSSEKNPEIFRHYKMILFMLLQKAMTEYISSEEIF |
| | | | DFIMKPNSPKTDIKEEEFLPQYKSCAYDNLIKLIADNVELQK |
| | | | WYITARLLSPREVNQLIGSFRSYKQFVSDIERRAKETNNSLSK |
| | | | SGMTVDVENITKVLDLCTKLNGRFSNELTDYFDSKDDYAVY |
| | | | VSKFLDFGFKIDEKFPAALLGEFCNKEENGKKIGIYHNGTEPI |
| | | | LNSNIIKSKLYGITDVVSRAVKPVSEKLIREYLQQEVKIKPYL |
| | | | ENGVCKNKEEQAALRKYQELKNRIEFRDIVEYSEIINELMGQ |
| | | | LINESYLRERDLMYFQLGFHYLCLNNYGAKPEGYYSIVNDK |
| | | | RTIKGAILYQIVAMYTYGLPIYHYVDGTISDRRKNKKTVLDT |
| | | | LNSSETVGAKIKYFIYYSDELFNDSLILYNAGLELFENINEHE |
| | | | NIVNLRKYIDHFKYYVSQDRSLLDIYSEVFDRYFTYDRKYKK |
| | | | NVMNLFSNIMLKHFIITDFEFSTGEKTIGEKNTAKKECAKVRI |
| | | | KRGGLSSDKFTYKFKDAKPIELSAKNTEFLDGVARILYYPEN |
| | | | VVLTDLVRNSEVEDEKRIEKYDRNHNSSPTRKDKTYKQDVK |
| | | | KNYNKKTSKAFDSSKLDTKSVGNNLSDNPVLKQFLSESKKK |
| | | | R |
| C2-29 | | Blautia sp. | MKISKVDHVKSGIDQKLSSQRGMLYKQPQKKYEGKQLEEH |
| | | Marseille- | VRNLSRKAKALYQVFPVSGNSKMEKELQIINSFIKNILLRLDS |
| | | P2398 | GKTSEEIVGYINTYSVASQISGDHIQELVDQHLKESLRKYTCV |
| | | (SEQ ID | GDKRIYVPDIIVALLKSKFNSETLQYDNSELKILIDFIREDYLK |
| | | No. 94) | EKQIKQIVHSIENNSTPLRIAEINGQKRLIPANVDNPKKSYIFE |
| | | | FLKEYAQSDPKGQESLLQHMRYLILLYLYGPDKITDDYCEEI |
| | | | EAWNFGSIVMDNEQLFSEEASMLIQDRIYVNQQIEEGRQSKD |
| | | | TAKVKKNKSKYRMLGDKIEHSINESVVKHYQEACKAVEEK |
| | | | DIPWIKYISDHVMSVYSSKNRVDLDKLSLPYLAKNTWNTWI |
| | | | SFIAMKYVDMGKGVYHFAMSDVDKVGKQDNLIIGQIDPKFS |
| | | | DGISSFDYERIKAEDDLHRSMSGYIAFAVNNFARAICSDEFRK |
| | | | KNRKEDVLTVGLDEIPLYDNVKRKLLQYFGGASNWDDSIIDI |
| | | | IDDKDLVACIKENLYVARNVNFHFAGSEKVQKKQDDILEEIV |
| | | | RKETRDIGKHYRKVFYSNNVAVFYCDEDIIKLMNHLYQREK |
| | | | PYQAQIPSYNKVISKTYLPDLIFMLLKGKNRTKISDPSIMNMF |
| | | | RGTFYFLLKEIYYNDFLQASNLKEMFCEGLKNNVKNKKSEK |
| | | | PYQNFMRRFEELENMGMDFGEICQQIMTDYEQQNKQKKKT |
| | | | ATAVMSEKDKKIRTLDNDTQKYKHFRTLLYIGLREAFIIYLK |
| | | | DEKNKEWYEFLREPVKREQPEEKEFVNKWKLNQYSDCSELI |
| | | | LKDSLAAAWYVVAHFINQAQLNHLIGDIKNYIQFISDIDRRA |
| | | | KSTGNPVSESTEIQIERYRKILRVLEFAKFFCGQITNVLTDYY |
| | | | QDENDFSTHVGHYVKFEKKNMEPAHALQAFSNSLYACGKE |
| | | | KKKAGFYYDGMNPIVNRNITLASMYGNKKLLENAMNPVTE |
| | | | QDIRKYYSLMAELDSVLKNGAVCKSEDEQKNLRHFQNLKN |
| | | | RIELVDVLTLSELVNDLVAQLIGWVYIRERDMMYLQLGLHY |
| | | | IKLYFTDSVAEDSYLRTLDLEEGSIADGAVLYQIASLYSFNLP |
| | | | MYVKPNKSSVYCKKHVNSVATKFDIFEKEYCNGDETVIENG |
| | | | LRLFENINLHKDMVKFRDYLAHFKYFAKLDESILELYSKAYD |
| | | | FFFSYNIKLKKSVSYVLTNVLLSYFINAKLSFSTYKSSGNKTV |
| | | | QHRTTKISVVAQTDYFTYKLRSIVKNKNGVESIENDDRRCEV |
| | | | VNIAARDKEFVDEVCNVINYNSDK |
| C2-30 | | Leptotrichia | MKITKIDGISHKKYIKEGKLVKSTSEENKTDERLSELLTIRLD |
| | | sp. | TYIKNPDNASEEENRIRRENLKEFFSNKVLYLKDGILYLKDR |
| | | Marseille- | REKNQLQNKNYSEEDISEYDLKNKNNFLVLKKILLNEDINSE |
| | | P3007 | ELEIFRNDFEKKLDKINSLKYSLEENKANYQKINENNIKKVE |
| | | (SEQ ID | GKSKRNIFYNYYKDSAKRNDYINNIQEAFDKLYKKEDIENLF |
| | | No. 95) | FLIENSKKHEKYKIRECYHKIIGRKNDKENFATIIYEEIQNVNN |
| | | | MKELIEKVPNVSELKKSQVFYKYYLNKEKLNDENIKYVFCH |
| | | | FVEIEMSKLLKNYVYKKPSNISNDKVKRIFEYQSLKKLIENKL |
| | | | LNKLDTYVRNCGKYSFYLQDGEIATSDFIVGNRQNEAFLRNI |
| | | | IGVSSTAYFSLRNILETENENDITGRMRGKTVKNNKGEEKYIS |
| | | | GEIDKLYDNNKQNEVKKNLKMFYSYDFNMNSKKEIEDFFSN |
| | | | IDEAISSIRHGIVHFNLELEGKDIFTFKNIVPSQISKKMFHDEIN |
| | | | EKKLKLKIFKQLNSANVFRYLEKYKILNYLNRTRFEFVNKNI |
| | | | PFVPSFTKLYSRIDDLKNSLGIYWKTPKTNDDNKTKEITDAQI |
| | | | YLLKNIYYGEFLNYFMSNNGNFFEITKEIIELNKNDKRNLKT |
| | | | GFYKLQKFENLQEKTPKEYLANIQSLYMINAGNQDEEEKDT |
| | | | YIDFIQKIFLKGFMTYLANNGRLSLIYIGSDEETNTSLAEKKQ |
| | | | EFDKFLKKYEQNNNIEIPYEINEFVREIKLGKILKYTERLNMF |
| | | | YLILKLLNHKELTNLKGSLEKYQSANKEEAFSDQLELINLLN |
| | | | LDNNRVTEDFELEADEIGKFLDFNGNKVKDNKELKKFDTNK |
| | | | IYFDGENIIKHRAFYNIKKYGMLNLLEKISDEAKYKISIEELKN |
| | | | YSKKKNEIEENHTTQENLHRKYARPRKDEKFTDEDYKKYEK |
| | | | AIRNIQQYTHLKNKVEFNELNLLQSLLLRILHRLVGYTSIWER |
| | | | DLRFRLKGEFPENQYIEEIFNFDNSKNVKYKNGQIVEKYINFY |
| | | | KELYKDDTEKISIYSDKKVKELKKEKKDLYIRNYIAHFNYIPN |
| | | | AEISLLEMLENLRKLLSYDRKLKNAIMKSIVDILKEYGFVVTF |
| | | | KIEKDKKIRIESLKSEEVVHLKKLKLKDNDKKKEPIKTYRNS |
| | | | KELCKLVKVMFEYKMKEKKSEN |
| C2-31 | | Bacteroides | MRITKVKVKESSDQKDKMVLIHRKVGEGTLVLDENLADLTA |
| | | ihuae (SEQ | PIIDKYKDKSFELSLLKQTLVSEKEMNIPKCDKCTAKERCLSC |
| | | ID No. 96) | KQREKRLKEVRGAIEKTIGAVIAGRDIIPRLNIFNEDEICWLIK |
| | | | PKLRNEFTFKDVNKQVVKLNLPKVLVEYSKKNDPTLFLAYQ |
| | | | QWIAAYLKNKKGHIKKSILNNRVVIDYSDESKLSKRKQALEL |
| | | | WGEEYETNQRIALESYHTSYNIGELVTLLPNPEEYVSDKGEIR |
| | | | PAFHYKLKNVLQMHQSTVFGTNEILCINPIFNENRANIQLSAY |
| | | | NLEVVKYFEHYFPIKKKKKNLSLNQAIYYLKVETLKERLSLQ |
| | | | LENALRMNLLQKGKIKKHEFDKNTCSNTLSQIKRDEFFVLNL |
| | | | VEMCAFAANNIRNIVDKEQVNEILSKKDLCNSLSKNTIDKEL |
| | | | CTKFYGADFSQIPVAIWAMRGSVQQIRNEIVHYKAEAIDKIF |
| | | | ALKTFEYDDMEKDYSDTPFKQYLELSIEKIDSFFIEQLSSNDV |
| | | | LNYYCTEDVNKLLNKCKLSLRRTSIPFAPGFKTIYELGCHLQ |
| | | | DSSNTYRIGHYLMLIGGRVANSTVTKASKAYPAYRFMLKLI |
| | | | YNHLFLNKFLDNHNKRFFMKAVAFVLKDNRENARNKFQYA |
| | | | FKEIRMMNNDESIASYMSYIHSLSVQEQEKKGDKNDKVRYN |
| | | | TEKFIEKVFVKGFDDFLSWLGVEFILSPNQEERDKTVTREEYE |
| | | | NLMIKDRVEHSINSNQESHIAFFTFCKLLDANHLSDLRNEWI |
| | | | KFRSSGDKEGFSYNFAIDIIELCLLTVDRVEQRRDGYKEQTEL |
| | | | KEYLSFFIKGNESENTVWKGFYFQQDNYTPVLYSPIELIRKY |
| | | | GTLELLKLIIVDEDKITQGEFEEWQTLKKVVEDKVTRRNELH |
| | | | QEWEDMKNKSSFSQEKCSIYQKLCRDIDRYNWLDNKLHLV |
| | | | HLRKLHNLVIQILSRMARFIALWDRDFVLLDASRANDDYKL |
| | | | LSFFNFRDFINAKKTKTDDELLAEFGSKIEKKNAPFIKAEDVP |
| | | | LMVECIEAKRSFYQKVFFRNNLQVLADRNFIAHYNYISKTAK |
| | | | CSLFEMIIKLRTLMYYDRKLRNAVVKSIANVFDQNGMVLQL |
| | | | SLDDSHELKVDKVISKRIVHLKNNNIMTDQVPEEYYKICRRL |
| | | | LEMKK |
| C2-32 | | SAMN05216357_ | MEFRDSIFKSLLQKEIEKAPLCFAEKLISGGVFSYYPSERLKEF |
| | | 1045 | VGNHPFSLFRKTMPFSPGFKRVMKSGGNYQNANRDGRFYD |
| | | [Porphy- | LDIGVYLPKDGFGDEEWNARYFLMKLIYNQLFLPYFADAEN |
| | | romonadaceae | HLFRECVDFVKRVNRDYNCKNNNSEEQAFIDIRSMREDESIA |
| | | bacterium | DYLAFIQSNIIIEENKKKETNKEGQINFNKFLLQVFVKGFDSFL |
| | | KH3CP3RA] | KDRTELNFLQLPELQGDGTRGDDLESLDKLGAVVAVDLKLD |
| | | (SEQ ID | ATGIDADLNENISFYTFCKLLDSNHLSRLRNEIIKYQSANSDF |
| | | No. 97) | SHNEDFDYDRIISIIELCMLSADHVSTNDNESIFPNNDKDFSGI |
| | | | RPYLSTDAKVETFEDLYVHSDAKTPITNATMVLNWKYGTDK |
| | | | LFERLMISDQDFLVTEKDYFVWKELKKDIEEKIKLREELHSL |
| | | | WVNTPKGKKGAKKKNGRETTGEFSEENKKEYLEVCREIDRY |
| | | | VNLDNKLHFVHLKRMHSLLIELLGRFVGFTYLFERDYQYYH |
| | | | LEIRSRRNKDAGVVDKLEYNKIKDQNKYDKDDFFACTFLYE |
| | | | KANKVRNFIAHFNYLTMWNSPQEEEHNSNLSGAKNSSGRQN |
| | | | LKCSLTELINELREVMSYDRKLKNAVTKAVIDLFDKHGMVI |
| | | | KFRIVNNNNNDNKNKHHLELDDIVPKKIMHLRGIKLKRQDG |
| | | | KPIPIQTDSVDPLYCRMWKKLLDLKPTPF |
| C2-33 | | Listeria | MHDAWAENPKKPQSDAFLKEYKACCEAIDTYNWHKNKAT |
| | | riparia | LVYVNELHHLLIDILGRLVGYVAIADRDFQCMANQYLKSSG |
| | | (SEQ ID | HTERVDSWINTIRKNRPDYIEKLDIFMNKAGLFVSEKNGRNY |
| | | No. 98) | IAHLNYLSPKHKYSLLYLFEKLREMLKYDRKLKNAVTKSLID |
| | | | LLDKHGMCVVFANLKNNKHRLVIASLKPKKIETFKWKKIK |
| C2-34 | | Insolitispirihum | MRIIRPYGSSTVASPSPQDAQPLRSLQRQNGTFDVAEFSRRHP |
| | | peregrinum | ELVLAQWVAMLDKIIRKPAPGKNSTALPRPTAEQRRLRQQV |
| | | (SEQ ID | GAALWAEMQRHTPVPPELKAVWDSKVHPYSKDNAPATAKT |
| | | No. 99) | PSHRGRWYDRFGDPETSAATVAEGVRRHLLDSAQPFRANGG |
| | | | QPKGKGVIEHRALTIQNGTLLHHHQSEKAGPLPEDWSTYRA |
| | | | DELVSTIGKDARWIKVAASLYQHYGRIFGPTTPISEAQTRPEF |
| | | | VLHTAVKAYYRRLFKERKLPAERLERLLPRTGEALRHAVTV |
| | | | QHGNRSLADAVRIGKILHYGWLQNGEPDPWPDDAALYSSR |
| | | | YWGSDGQTDIKHSEAVSRVWRRALTAAQRTLTSWLYPAGT |
| | | | DAGDILLIGQKPDSIDRNRLPLLYGDSTRHWTRSPGDVWLFL |
| | | | KQTLENLRNSSFHFKTLSAFTSHLDGTCESEPAEQQAAQALW |
| | | | QDDRQQDHQQVFLSLRALDATTYLPTGPLHRIVNAVQSTDA |
| | | | TLPLPRFRRVVTRAANTRLKGFPVEPVNRRTMEDDPLLRCR |
| | | | YGVLKLLYERGFRAWLETRPSIASCLDQSLKRSTKAAQTING |
| | | | KNSPQGVEILSRATKLLQAEGGGGHGIHDLFDRLYAATARE |
| | | | MRVQVGYHHDAEAARQQAEFIEDLKCEVVARAFCAYLKTL |
| | | | GIQGDTFRRQPEPLPTWPDLPDLPSSTIGTAQAALYSVLHLMP |
| | | | VEDVGSLLHQLRRWLVALQARGGEDGTAITATIPLLELYLN |
| | | | RHDAKFSGGGAGTGLRWDDWQVFFDCQATFDRVFPPGPAL |
| | | | DSHRLPLRGLREVLRFGRVNDLAALIGQDKITAAEVDRWHT |
| | | | AEQTIAAQQQRREALHEQLSRKKGTDAEVDEYRALVTAIAD |
| | | | HRHLTAHVTLSNVVRLHRLMTTVLGRLVDYGGLWERDLTF |
| | | | VTLYEAHRLGGLRNLLSESRVNKFLDGQTPAALSKKNNAEE |
| | | | NGMISKVLGDKARRQIRNDFAHFNMLQQGKKTINLTDEINN |
| | | | ARKLMAHDRKLKNAITRSVTTLLQQDGLDIVWTMDASHRL |
| | | | TDAKIDSRNAIHLHKTHNRANIREPLHGKSYCRWVAALFGA |
| | | | TSTPSATKKSDKIR |

[0585] In certain example embodiments, the CRISPR effector protein is a Cas13b protein selected from Table 2.

TABLE 3

| | | |
|---|---|---|
| Bergeyella | 1 | MENKTSLGNNIYYNPFKPQDKSYFAGYFNAAMENTDSVFRELG |
| zoohelcum | (SEQ | KRLKGKEYTSENFFDAIFKENISLVEYERYVKLLSDYFPMARLL |
| | ID No. | DKKEVPIKERKENFKKNFKGIIKAVRDLRNFYTHKEHGEVEITD |
| | 100) | EIFGVLDEMLKSTVLTVKKKKVKTDKTKEILKKSIEKQLDILCQ |
| | | KKLEYLRDTARKIEEKRRNQRERGEKELVAPFKYSDKRDDLIA |
| | | AIYNDAFDVYIDKKKDSLKESSKAKYNTKSDPQQEEGDLKIPIS |
| | | KNGVVFLLSLFLTKQEIHAFKSKIAGFKATVIDEATVSEATVSHG |
| | | KNSICFMATHEIFSHLAYKKLKRKVRTAEINYGEAENAEQLSVY |
| | | AKETLMMQMLDELSKVPDVVYQNLSEDVQKTFIEDWNEYLKE |
| | | NNGDVGTMEEEQVIHPVIRKRYEDKFNYFAIRFLDEFAQFPTLR |
| | | FQVHLGNYLHDSRPKENLISDRRIKEKITVFGRLSELEHKKALFI |
| | | KNTETNEDREHYWEIFPNPNYDFPKENISVNDKDFPIAGSILDRE |
| | | KQPVAGKIGIKVKLLNQQYVSEVDKAVKAHQLKQRKASKPSIQ |
| | | NIIEEIVPINESNPKEAIVFGGQPTAYLSMNDIHSILYEFFDKWEK |
| | | KKEKLEKKGEKELRKEIGKELEKKIVGKIQAQIQQIIDKDTNAKI |
| | | LKPYQDGNSTAIDKEKLIKDLKQEQNILQKLKDEQTVREKEYN |
| | | DFIAYQDKNREINKVRDRNHKQYLKDNLKRKYPEAPARKEVL |
| | | YYREKGKVAVWLANDIKRFMPTDFKNEWKGEQHSLLQKSLAY |
| | | YEQCKEELKNLLPEKVFQHLPFKLGGYFQQKYLYQFYTCYLDK |
| | | RLEYISGLVQQAENFKSENKVFKKVENECFKFLKKQNYTHKEL |
| | | DARVQSILGYPIFLERGFMDEKPTIIKGKTFKGNEALFADWFRY |
| | | YKEYQNFQTFYDTENYPLVELEKKQADRKRKTKIYQQKKNDV |
| | | FTLLMAKHIFKSVFKQDSIDQFSLEDLYQSREERLGNQERARQT |
| | | GERNTNYIWNKTVDLKLCDGKITVENVKLKNVGDFIKYEYDQR |
| | | VQAFLKYEENIEWQAFLIKESKEEENYPYVVEREIEQYEKVRRE |
| | | ELLKEVHLIEEYILEKVKDKEILKKGDNQNFKYYILNGLLKQLK |
| | | NEDVESYKVFNLNTEPEDVNINQLKQEATDLEQKAFVLTYIRN |
| | | KFAHNQLPKKEFWDYCQEKYGKIEKEKTYAEYFAEVFKKEKE |
| | | ALIK |
| Prevotella | 2 | MEDDKKTTDSIRYELKDKHFWAAFLNLARHNVYITVNHINKIL |
| intermedia | (SEQ | EEGEINRDGYETTLKNTWNEIKDINKKDRLSKLIIKHFPFLEAAT |
| | ID No. | YRLNPTDTTKQKEEKQAEAQSLESLRKSFFVFIYKLRDLRNHYS |
| | 101) | HYKHSKSLERPKFEEGLLEKMYNIFNASIRLVKEDYQYNKDINP |
| | | DEDFKHLDRTEEEFNYYFTKDNEGNITESGLLFFVSLFLEKKDAI |
| | | WMQQKLRGFKDNRENKKKMTNEVFCRSRMLLPKLRLQSTQTQ |
| | | DWILLDMLNELIRCPKSLYERLREEDREKFRVPIEIADEDYDAEQ |
| | | EPFKNTLVRHQDRFPYFALRYFDYNEIFTNLRFQIDLGTYHFSTY |
| | | KKQIGDYKESHHLTHKLYGFERIQEFTKQNRPDEWRKFVKTFN |
| | | SFETSKEPYIPETTPHYHLENQKIGIRFRNDNDKIWPSLKTNSEK |
| | | NEKSKYKLDKSFQAEAFLSVHELLPMMFYYLLLKTENTDNDNE |
| | | IETKKKENKNDKQEKHKIEEIIENKITEIYALYDTFANGEIKSIDE |
| | | LEEYCKGKDIEIGHLPKQMIAILKDEHKVMATEAERKQEEMLV |
| | | DVQKSLESLDNQINEEIENVERKNSSLKSGKIASWLVNDMMRF |
| | | QPVQKDNEGKPLNNSKANSTEYQLLQRTLAFFGSEHERLAPYF |
| | | KQTKLIESSNPHPFLKDTEWEKCNNILSFYRSYLEAKKNFLESLK |
| | | PEDWEKNQYFLKLKEPKTKPKTLVQGWKNGFNLPRGIFTEPIRK |
| | | WFMKHRENITVAELKRVGLVAKVIPLFFSEEYKDSVQPFYNYH |
| | | FNVGNINKPDEKNFLNCEERRELLRKKKDEFKKMTDKEKEENP |
| | | SYLEFKSWNKFERELRLVRNQDIVTWLLCMELFNKKKIKELNV |
| | | EKIYLKNINTNTTKKEKNTEEKNGEEKNIKEKNNILNRIMPMRL |
| | | PIKVYGRENFSKNKKKKIRRNTFFTVYIEEKGTKLLKQGNFKAL |
| | | ERDRRLGGLFSFVKTPSKAESKSNTISKLRVEYELGEYQKARIEII |
| | | KDMLALEKTLIDKYNSLDTDNFNKMLTDWLELKGEPDKASFQ |
| | | NDVDLLIAVRNAFSHNQYPMRNRIAFANINPFSLSSANTSEEKG |
| | | LGIANQLKDKTHKTIEKIIEIEKPIETKE |
| Prevotella | 3 | MQKQDKLFVDRKKNAIFAFPKYITIMENKEKPEPIYYELTDKHF |
| buccae | (SEQ | WAAFLNLARHNVYTTINHINRRLEIAELKDDGYMMGIKGSWNE |
| | ID No. | QAKKLDKKVRLRDLIMKHFPFLEAAAYEMTNSKSPNNKEQRE |
| | 102) | KEQSEALSLNNLKNVLFIFLEKLQVLRNYYSHYKYSEESPKPIFE |
| | | TSLLKNMYKVFDANVRLVKRDYMHHENIDMQRDFTHLNRKK |
| | | QVGRTKNIIDSPNFHYHFADKEGNMTIAGLLFFVSLFLDKKDAI |
| | | WMQKKLKGFKDGRNLREQMTNEVFCRSRISLPKLKLENVQTK |
| | | DWMQLDMLNELVRCPKSLYERLREKDRESFKVPFDIFSDDYNA |
| | | EEEPFKNTLVRHQDRFPYFVLRYFDLNEIFEQLRFQIDLGTYHFS |
| | | IYNKRIGDEDEVRHLTHHLYGFARIQDFAPQNQPEEWRKLVKD |
| | | LDHFETSQEPYISKTAPHYHLENEKIGIKFCSAHNNLFPSLQTDK |
| | | TCNGRSKFNLGTQFTAEAFLSVHELLPMMFYYLLLTKDYSRKE |
| | | SADKVEGIIRKEISNIYAIYDAFANNEINSIADLTRRLQNTNILQG |
| | | HLPKQMISILKGRQKDMGKEAERKIGEMIDDTQRRLDLLCKQT |
| | | NQKIRIGKRNAGLLKSGKIADWLVNDMMRFQPVQKDQNNIPIN |
| | | NSKANSTEYRMLQRALALFGSENFRLKAYFNQMNLVGNDNPH |
| | | PFLAETQWEHQTNILSFYRNYLEARKKYLKGLKPQNWKQYQH |
| | | FLILKVQKTNRNTLVTGWKNSFNLPRGIFTQPIREWFEKHNNSK |
| | | RIYDQILSFDRVGFVAKAIPLYFAEEYKDNVQPFYDYPFNIGNRL |
| | | KPKKRQFLDKKERVELWQKNKELFKNYPSEKKKTDLAYLDFLS |
| | | WKKFERELRLIKNQDIVTWLMFKELFNMATVEGLKIGEIHLRDI |
| | | DTNTANEESNNILNRIMPMKLPVKTYETDNKGNILKERPLATFY |
| | | IEETETKVLKQGNFKALVKDRRLNGLFSFAETTDLNLEEHPISKL |
| | | SVDLELIKYQTTRISIFEMTLGLEKKLIDKYSTLPTDSFRNMLER |
| | | WLQCKANRPELKNYVNSLIAVRNAFSHNQYPMYDATLFAEVK |
| | | KFTLFPSVDTKKIELNIAPQLLEIVGKAIKEIEKSENKN |
| Porphyromonas | 4 | MNTVPASENKGQSRTVEDDPQYFGLYLNLARENLIEVESHVRIK |
| gingivalis | (SEQ | FGKKKLNEESLKQSLLCDHLLSVDRWTKVYGHSRRYLPFLHYF |
| | ID No. | DPDSQIEKDHDSKTGVDPDSAQRLIRELYSLLDFLRNDFSHNRL |
| | 103) | DGTTFEHLEVSPDISSFITGTYSLACGRAQSRFAVFFKPDDFVLA |
| | | KNRKEQLISVADGKECLTVSGFAFFICLFLDREQASGMLSRIRGF |
| | | KRTDENWARAVHETFCDLCIRHPHDRLESSNTKEALLLDMLNE |
| | | LNRCPRILYDMLPEEERAQFLPALDENSMNNLSENSLDEESRLL |
| | | WDGSSDWAEALTKRIRHQDRFPYLMLRFIEEMDLLKGIRFRVD |
| | | LGEIELDSYSKKVGRNGEYDRTITDHALAFGKLSDFQNEEEVSR |
| | | MISGEASYPVRFSLFAPRYAIYDNKIGYCHTSDPVYPKSKTGEK |
| | | RALSNPQSMGFISVHDLRKLLLMELLCEGSFSRMQSDFLRKANR |
| | | ILDETAEGKLQFSALFPEMRHRFIPPQNPKSKDRREKAETTLEKY |
| | | KQEIKGRKDKLNSQLLSAFDMDQRQLPSRLLDEWMNIRPASHS |
| | | VKLRTYVKQLNEDCRLRLRKFRKDGDGKARAIPLVGEMATFLS |
| | | QDIVRMIISEETKKLITSAYYNEMQRSLAQYAGEENRRQFRAIV |
| | | AELRLLDPSSGHPFLSATMETAHRYTEGFYKCYLEKKREWLAK |
| | | IFYRPEQDENTKRRISVFFVPDGEARKLLPLLIRRRMKEQNDLQ |
| | | DWIRNKQAHPIDLPSHLFDSKVMELLKVKDGKKKWNEAFKDW |
| | | WSTKYPDGMQPFYGLRRELNIHGKSVSYIPSDGKKFADCYTHL |
| | | MEKTVRDKKRELRTAGKPVPPDLAADIKRSFHRAVNEREFMLR |
| | | LVQEDDRLMLMAINKMMTDREEDILPGLKNIDSILDEENQFSLA |
| | | VHAKVLEKEGEGGDNSLSLVPATIEIKSKRKDWSKYIRYRYDR |
| | | RVPGLMSHFPEHKATLDEVKTLLGEYDRCRIKIFDWAFALEGAI |
| | | MSDRDLKPYLHESSSREGKSGEHSTLVKMLVEKKGCLTPDESQ |
| | | YLILIRNKAAHNQFPCAAEMPLIYRDVSAKVGSIEGSSAKDLPE |
| | | GSSLVDSLWKKYEMIIRKILPILDPENRFFGKLLNNMSQPINDL |
| Bacteroides | 5 | MESIKNSQKSTGKTLQKDPPYFGLYLNMALLNVRKVENHIRKW |
| pyogenes | (SEQ | LGDVALLPEKSGFHSLLTTDNLSSAKWTRFYYKSRKFLPFLEMF |
| | ID No. | DSDKKSYENRRETAECLDTIDRQKISSLLKEVYGKLQDIRNAFS |
| | 104) | HYHIDDQSVKHTALIISSEMHRFIENAYSFALQKTRARFTGVFVE |
| | | TDFLQAEEKGDNKKFFAIGGNEGIKLKDNALIFLICLFLDREEAF |
| | | KFLSRATGFKSTKEKGFLAVRETFCALCCRQPHERLLSVNPREA |
| | | LLMDMLNELNRCPDILFEMLDEKDQKSFLPLLGEEEQAHILENS |
| | | LNDELCEAIDDPFEMIASLSKRVRYKNRFPYLMLRYIEEKNLLPF |
| | | IRFRIDLGCLELASYPKKMGEENNYERSVTDHAMAFGRLTDFH |
| | | NEDAVLQQITKGITDEVRFSLYAPRYAIYNNKIGFVRTSGSDKIS |
| | | FPTLKKKGGEGHCVAYTLQNTKSFGFISIYDLRKILLLSFLDKDK |
| | | AKNIVSGLLEQCEKHWKDLSENLFDAIRTELQKEFPVPLIRYTLP |
| | | RSKGGKLVSSKLADKQEKYESEFERRKEKLTEILSEKDFDLSQIP |
| | | RRMIDEWLNVLPTSREKKLKGYVETLKLDCRERLRVFEKREKG |
| | | EHPLPPRIGEMATDLAKDIIRMVIDQGVKQRITSAYYSEIQRCLA |
| | | QYAGDDNRRHLDSIIRELRLKDTKNGHPFLGKVLRPGLGHTEK |
| | | LYQRYFEEKKEWLEATFYPAASPKRVPRFVNPPTGKQKELPLII |
| | | RNLMKERPEWRDWKQRKNSHPIDLPSQLFENEICRLLKDKIGKE |
| | | PSGKLKWNEMFKLYWDKEFPNGMQRFYRCKRRVEVFDKVVE |
| | | YEYSEEGGNYKKYYEALIDEVVRQKISSSKEKSKLQVEDLTLSV |
| | | RRVFKRAINEKEYQLRLLCEDDRLLFMAVRDLYDWKEAQLDL |
| | | DKIDNMLGEPVSVSQVIQLEGGQPDAVIKAECKLKDVSKLMRY |
| | | CYDGRVKGLMPYFANHEATQEQVEMELRHYEDHRRRVFNWV |
| | | FALEKSVLKNEKLRRFYEESQGGCEHRRCIDALRKASLVSEEEY |
| | | EFLVHIRNKSAHNQFPDLEIGKLPPNVTSGFCECIWSKYKAIICRI |
| | | IPFIDPERRFFGKLLEQK |
| Alistipes | 6 | MSNEIGAFREHQFAYAPGNEKQEEATFATYFNLALSNVEGMMF |
| sp. | (SEQ | GEVESNPDKIEKSLDTLPPAILRQIASFIWLSKEDHPDKAYSTEE |
| ZOR0009 | ID No. | VKVIVTDLVRRLCFYRNYFSHCFYLDTQYFYSDELVDTTAIGEK |
| | 105) | LPYNFHHFITNRLFRYSLPEITLFRWNEGERKYEILRDGLIFFCCL |
| | | FLKRGQAERFLNELRFFKRTDEEGRIKRTIFTKYCTRESHKHIGIE |
| | | EQDFLIFQDIIGDLNRVPKVCDGVVDLSKENERYIKNRETSNESD |
| | | ENKARYRLLIREKDKFPYYLMRYIVDFGVLPCITFKQNDYSTKE |
| | | GRGQFHYQDAAVAQEERCYNFVVRNGNVYYSYMPQAQNVVR |
| | | ISELQGTISVEELRNMVYASINGKDVNKSVEQYLYHLHLLYEKI |
| | | LTISGQTIKEGRVDVEDYRPLLDKLLLRPASNGEELRRELRKLLP |
| | | KRVCDLLSNRFDCSEGVSAVEKRLKAILLRHEQLLLSQNPALHI |
| | | DKIKSVIDYLYLFFSDDEKFRQQPTEKAHRGLKDEEFQMYHYL |
| | | VGDYDSHPLALWKELEASGRLKPEMRKLTSATSLHGLYMLCL |
| | | KGTVEWCRKQLMSIGKGTAKVEAIADRVGLKLYDKLKEYTPE |
| | | QLEREVKLVVMHGYAAAATPKPKAQAAIPSKLTELRFYSFLGK |
| | | REMSFAAFIRQDKKAQKLWLRNFYTVENIKTLQKRQAAADAA |
| | | CKKLYNLVGEVERVHTNDKVLVLVAQRYRERLLNVGSKCAVT |
| | | LDNPERQQKLADVYEVQNAWLSIRFDDLDFTLTHVNLSNLRKA |
| | | YNLIPRKHILAFKEYLDNRVKQKLCEECRNVRRKEDLCTCCSPR |
| | | YSNLTSWLKENHSESSIEREAATMMLLDVERKLLSFLLDERRKA |
| | | IIEYGKFIPFSALVKECRLADAGLCGIRNDVLHDNVISYADAIGK |
| | | LSAYFPKEASEAVEYIRRTKEVREQRREELMANSSQ |
| Prevotella | 7a | MSKECKKQRQEKKRRLQKANFSISLTGKHVFGAYFNMARTNF |
| sp. | (SEQ | VKTINYILPIAGVRGNYSENQINKMLHALFLIQAGRNEELTTEQK |
| MA2016 | ID No. | QWEKKLRLNPEQQTKFQKLLFKHFPVLGPMMADVADHKAYL |
| | 106) | NKKKSTVQTEDETFAMLKGVSLADCLDIICLMADTLTECRNFY |
| | | THKDPYNKPSQLADQYLHQEMIAKKLDKVVVASRRILKDREGL |
| | | SVNEVEFLTGIDHLHQEVLKDEFGNAKVKDGKVMKTFVEYDD |
| | | FYFKISGKRLVNGYTVTTKDDKPVNVNTMLPALSDFGLLYFCV |
| | | LFLSKPYAKLFIDEVRLFEYSPFDDKENMIMSEMLSIYRIRTPRL |
| | | HKIDSHDSKATLAMDIFGELRRCPMELYNLLDKNAGQPFFHDE |
| | | VKHPNSHTPDVSKRLRYDDRFPTLALRYIDETELFKRIRFQLQL |
| | | GSFRYKFYDKENCIDGRVRVRRIQKEINGYGRMQEVADKRMD |
| | | KWGDLIQKREERSVKLEHEELYINLDQFLEDTADSTPYVTDRRP |
| | | AYNIHANRIGLYWEDSQNPKQYKVFDENGMYIPELVVTEDKKA |
| | | PIKMPAPRCALSVYDLPAMLFYEYLREQQDNEFPSAEQVIIEYE |
| | | DDYRKFFKAVAEGKLKPFKRPKEFRDFLKKEYPKLRMADIPKK |
| | | LQLFLCSHGLCYNNKPETVYERLDRLTLQHLEERELHIQNRLEH |
| | | YQKDRDMIGNKDNQYGKKSFSDVRHGALARYLAQSMMEWQP |
| | | TKLKDKEKGHDKLTGLNYNVLTAYLATYGHPQVPEEGFTPRTL |
| | | EQVLINAHLIGGSNPHPFINKVLALGNRNIEELYLHYLEEELKHI |
| | | RSRIQSLSSNPSDKALSALPFIHHDRMRYHERTSEEMMALAARY |
| | | TTIQLPDGLFTPYILEILQKHYTENSDLQNALSQDVPVKLNPTCN |
| | | AAYLITLFYQTVLKDNAQPFYLSDKTYTRNKDGEKAESFSFKR |
| | | AYELFSVLNNNKKDTFPFEMIPLFLTSDEIQERLSAKLLDGDGNP |
| | | VPEVGEKGKPATDSQGNTIWKRRIYSEVDDYAEKLTDRDMKIS |
| | | FKGEWEKLPRWKQDKIIKRRDETRRQMRDELLQRMPRYIRDIK |
| | | DNERTLRRYKTQDMVLELLAEKMFTNIISEQSSEFNWKQMRLS |
| | | KVCNEAFLRQTLTERVPVTVGETTIYVEQENMSLKNYGEFYRFL |
| | | TDDRLMSLLNNIVETLKPNENGDLVIRHTDLMSELAAYDQYRS |
| | | TIFMLIQSIENLIITNNAVLDDPDADGFWVREDLPKRNNFASLLE |
| | | LINQLNNVELTDDERKLLVAIRNAFSHNSYNIDFSLIKDVKHLPE |
| | | VAKGILQHLQSMLGVEITK |
| Prevotella | 7b | MSKECKKQRQEKKRRLQKANFSISLTGKHVFGAYFNMARTNF |
| sp. | (SEQ | VKTINYILPIAGVRGNYSENQINKMLHALFLIQAGRNEELTTEQK |
| MA2016 | ID No. | QWEKKLRLNPEQQTKFQKLLFKHFPVLGPMMADVADHKAYL |
| | 107) | NKKKSTVQTEDETFAMLKGVSLADCLDIICLMADTLTECRNFY |
| | | THKDPYNKPSQLADQYLHQEMIAKKLDKVVVASRRILKDREGL |
| | | SVNEVEFLTGIDHLHQEVLKDEFGNAKVKDGKVMKTFVEYDD |
| | | FYFKISGKRLVNGYTVTTKDDKPVNVNTMLPALSDFGLLYFCV |
| | | LELSKPYAKLFIDEVRLFEYSPFDDKENMIMSEMLSIYRIRTPRL |
| | | HKIDSHDSKATLAMDIFGELRRCPMELYNLLDKNAGQPFFHDE |
| | | VKHPNSHTPDVSKRLRYDDRFPTLALRYIDETELFKRIRFQLQL |
| | | GSFRYKFYDKENCIDGRVRVRRIQKEINGYGRMQEVADKRMD |
| | | KWGDLIQKREERSVKLEHEELYINLDQFLEDTADSTPYVTDRRP |
| | | AYNIHANRIGLYWEDSQNPKQYKVFDENGMYIPELVVTEDKKA |
| | | PIKMPAPRCALSVYDLPAMLFYEYLREQQDNEFPSAEQVIIIEYE |
| | | DDYRKFFKAVAEGKLKPFKRPKEFRDFLKKEYPKLRMADIPKK |
| | | LQLFLCSHGLCYNNKPETVYERLDRLTLQHLEERELHIQNRLEH |
| | | YQKDRDMIGNKDNQYGKKSFSDVRHGALARYLAQSMMEWQP |
| | | TKLKDKEKGHDKLTGLNYNVLTAYLATYGHPQVPEEGFTPRTL |
| | | EQVLINAHLIGGSNPHPFINKVLALGNRNIEELYLHYLEEELKHI |
| | | RSRIQSLSSNPSDKALSALPFIHHDRMRYHERTSEEMMALAARY |
| | | TTIQLPDGLFTPYILEILQKHYTENSDLQNALSQDVPVKLNPTCN |
| | | AAYLITLFYQTVLKDNAQPFYLSDKTYTRNKDGEKAESFSFKR |
| | | AYELFSVLNNNKKDTFPFEMIPLFLTSDEIQERLSAKLLDGDGNP |
| | | VPEVGEKGKPATDSQGNTIWKRRIYSEVDDYAEKLTDRDMKIS |
| | | FKGEWEKLPRWKQDKIIKRRDETRRQMRDELLQRMPRYIRDIK |
| | | DNERTLRRYKTQDMVLFLLAEKMFTNIISEQSSEFNWKQMRLS |
| | | KVCNEAFLRQTLTFRVPVTVGETTIYVEQENMSLKNYGEFYRFL |
| | | TDDRLMSLLNNIVETLKPNENGDLVIRHTDLMSELAAYDQYRS |
| | | TIFMLIQSIENLIITNNAVLDDPDADGFWVREDLPKRNNFASLLE |
| | | LINQLNNVELTDDERKLLVAIRNAFSHNSYNIDFSLIKDVKHLPE |
| | | VAKGILQHLQSMLGVEITK |
| Riemerella | 8 | MEKPLLPNVYTLKHKFFWGAFLNIARHNAFITICHINEQLGLKT |
| anatipestifer | (SEQ | PSNDDKIVDVVCETWNNILNNDHDLLKKSQLTELILKHFPFLTA |
| | ID No. | MCYHPPKKEGKKKGHQKEQQKEKESEAQSQAEALNPSKLIEAL |
| | 108) | EILVNQLHSLRNYYSHYKHKKPDAEKDIFKHLYKAFDASLRMV |
| | | KEDYKAHFTVNLTRDFAHLNRKGKNKQDNPDFNRYRFEKDGF |
| | | FTESGLLFFTNLFLDKRDAYWMLKKVSGFKASHKQREKMTTE |
| | | VFCRSRILLPKLRLESRYDHNQMLLDMLSELSRCPKLLYEKLSE |
| | | ENKKHFQVEADGFLDEIEEEQNPFKDTLIRHQDRFPYFALRYLD |
| | | LNESFKSIRFQVDLGTYHYCIYDKKIGDEQEKRHLTRTLLSFGRL |
| | | QDFTEINRPQEWKALTKDLDYKETSNQPFISKTTPHYHITDNKIG |
| | | FRLGTSKELYPSLEIKDGANRIAKYPYNSGFVAHAFISVHELLPL |
| | | MFYQHLTGKSEDLLKETVRHIQRIYKDFEEERINTIEDLEKANQ |
| | | GRLPLGAFPKQMLGLLQNKQPDLSEKAKIKIEKLIAETKLLSHR |
| | | LNTKLKSSPKLGKRREKLIKTGVLADWLVKDFMRFQPVAYDA |
| | | QNQPIKSSKANSTEFWFIRRALALYGGEKNRLEGYFKQTNLIGN |
| | | TNPHPFLNKFNWKACRNLVDFYQQYLEQREKFLEAIKNQPWEP |
| | | YQYCLLLKIPKENRKNLVKGWEQGGISLPRGLFTEAIRETLSED |
| | | LMLSKPIRKEIKKHGRVGFISRAITLYFKEKYQDKHQSFYNLSY |
| | | KLEAKAPLLKREEHYEYWQQNKPQSPTESQRLELHTSDRWKD |
| | | YLLYKRWQHLEKKLRLYRNQDVMLWLMTLELTKNHFKELNL |
| | | NYHQLKLENLAVNVQEADAKLNPLNQTLPMVLPVKVYPATAF |
| | | GEVQYHKTPIRTVYIREEHTKALKMGNFKALVKDRRLNGLFSFI |
| | | KEENDTQKHPISQLRLRRELEIYQSLRVDAFKETLSLEEKLLNKH |
| | | TSLSSLENEFRALLEEWKKEYAASSMVTDEHIAFIASVRNAFCH |
| | | NQYPFYKEALHAPIPLFTVAQPTTEEKDGLGIAEALLKVLREYC |
| | | EIVKSQI |
| Prevotella | 9 | MEDDKKTTGSISYELKDKHFWAAFLNLARHNVYITINHINKLLE |
| aurantiaca | (SEQ | IREIDNDEKVLDIKTLWQKGNKDLNQKARLRELMTKHFPFLET |
| | ID No. | AIYTKNKEDKKEVKQEKQAEAQSLESLKDCLFLFLDKLQEARN |
| | 109) | YYSHYKYSEFSKEPEFEEGLLEKMYNIFGNNIQLVINDYQHNKD |
| | | INPDEDFKHLDRKGQFKYSFADNEGNITESGLLFFVSLFLEKKD |
| | | AIWMQQKLNGFKDNLENKKKMTHEVFCRSRILMPKLRLESTQT |
| | | QDWILLDMLNELIRCPKSLYERLQGDDREKFKVPFDPADEDYN |
| | | AEQEPFKNTLIRHQDRFPYFVLRYFDYNEIFKNLRFQIDLGTYHF |
| | | SIYKKLIGGQKEDRHLTHKLYGFERIQEFAKQNRPDEWKAIVKD |
| | | LDTYETSNKRYISETTPHYHLENQKIGIRFRNGNKEIWPSLKTND |
| | | ENNEKSKYKLDKQYQAEAFLSVHELLPMMFYYLLLKKEKPNN |
| | | DEINASIVEGFIKREIRNIFKLYDAFANGEINNIDDLEKYCADKGI |
| | | PKRHLPKQMVAILYDEHKDMVKEAKRKQKEMVKDTKKLLAT |
| | | LEKQTQKEKEDDGRNVKLLKSGEIARWLVNDMMRFQPVQKD |
| | | NEGKPLNNSKANSTEYQMLQRSLALYNNEEKPTRYFRQVNLIE |
| | | SNNPHPFLKWTKWEECNNILTFYYSYLTKKIEFLNKLKPEDWK |
| | | KNQYFLKLKEPKTNRETLVQGWKNGFNLPRGIFTEPIREWFKR |
| | | HQNNSKEYEKVEALDRVGLVTKVIPLFFKEEYFKDKEENFKED |
| | | TQKEINDCVQPFYNFPYNVGNIHKPKEKDFLHREERIELWDKKK |
| | | DKFKGYKEKIKSKKLTEKDKEEFRSYLEFQSWNKFERELRLVR |
| | | NQDIVTWLLCKELIDKLKIDELNIEELKKLRLNNIDTDTAKKEK |
| | | NNILNRVMPMELPVTVYEIDDSHKIVKDKPLHTIYIKEAETKLL |
| | | KQGNFKALVKDRRLNGLFSFVKTNSEAESKRNPISKLRVEYELG |
| | | EYQEARIEIIQDMLALEEKLINKYKDLPTNKFSEMLNSWLEGKD |
| | | EADKARFQNDVDFLIAVRNAFSHNQYPMHNKIEFANIKPFSLYT |
| | | ANNSEEKGLGIANQLKDKTKETTDKIKKIEKPIETKE |
| Prevotella | 10 | MEDKPFWAAFFNLARHNVYLTVNHINKLLDLEKLYDEGKHKEI |
| saccharolytica | (SEQ | FEREDIFNISDDVMNDANSNGKKRKLDIKKIWDDLDTDLTRKY |
| | ID No. | QLRELILKHFPFIQPAIIGAQTKERTTIDKDKRSTSTSNDSLKQTG |
| | 110) | EGDINDLLSLSNVKSMFFRLLQILEQLRNYYSHVKHSKSATMPN |
| | | FDEDLLNWMRYIFIDSVNKVKEDYSSNSVIDPNTSFSHLIYKDE |
| | | QGKIKPCRYPFTSKDGSINAFGLLFFVSLFLEKQDSIWMQKKIPG |
| | | FKKASENYMKMTNEVFCRNHILLPKIRLETVYDKDWMLLDML |
| | | NEVVRCPLSLYKRLTPAAQNKFKVPEKSSDNANRQEDDNPFSRI |
| | | LVRHQNRFPYFVLRFFDLNEVFTTLRFQINLGCYHFAICKKQIGD |
| | | KKEVHHLIRTLYGFSRLQNFTQNTRPEEWNTLVKTTEPSSGNDG |
| | | KTVQGVPLPYISYTIPHYQIENEKIGIKIFDGDTAVDTDIWPSVST |
| | | EKQLNKPDKYTLTPGFKADVFLSVHELLPMMFYYQLLLCEGML |
| | | KTDAGNAVEKVLIDTRNAIFNLYDAFVQEKINTITDLENYLQDK |
| | | PILIGHLPKQMIDLLKGHQRDMLKAVEQKKAMLIKDTERRLKL |
| | | LDKQLKQETDVAAKNTGTLLKNGQIADWLVNDMMRFQPVKR |
| | | DKEGNPINCSKANSTEYQMLQRAFAFYATDSCRLSRYFTQLHLI |
| | | HSDNSHLFLSRFEYDKQPNLIAFYAAYLKAKLEFLNELQPQNW |
| | | ASDNYFLLLRAPKNDRQKLAEGWKNGFNLPRGLFTEKIKTWFN |
| | | EHKTIVDISDCDIFKNRVGQVARLIPVFFDKKFKDHSQPFYRYDF |
| | | NVGNVSKPTEANYLSKGKREELFKSYQNKFKNNIPAEKTKEYR |
| | | EYKNFSLWKKFERELRLIKNQDILIWLMCKNLFDEKIKPKKDIL |
| | | EPRIAVSYIKLDSLQTNTSTAGSLNALAKVVPMTLAIHIDSPKPK |
| | | GKAGNNEKENKEFTVYIKEEGTKLLKWGNFKTLLADRRIKGLF |
| | | SYIEHDDIDLKQHPLTKRRVDLELDLYQTCRIDIFQQTLGLEAQL |
| | | LDKYSDLNTDNFYQMLIGWRKKEGIPRNIKEDTDFLKDVRNAF |
| | | SHNQYPDSKKIAFRRIRKFNPKELILEEEEGLGIATQMYKEVEKV |
| | | VNRIKRIELFD |
| HMPREF9 | 11(SEQ | MKDILTTDTTEKQNRFYSHKIADKYFFGGYFNLASNNIYEVFEE |
| 712_03108 | ID No. | VNKRNTFGKLAKRDNGNLKNYIIHVFKDELSISDFEKRVAIFAS |
| [Myroides | 111) | YFPILETVDKKSIKERNRTIDLTLSQRIRQFREMLISLVTAVDQLR |
| odoratimimus | | NFYTHYHEISDIVIENKVLDFLNSSFVSTALHVKDKYLKTDKTKE |
| CCUG | | FLKETIAAELDILIEAYKKKQIEKKNTRFKANKREDILNAIYNEA |
| 10230] | | FWSFINDKDKDKDKETVVAKGADAYFEKNHHKSNDPDFALNIS |
| | | EKGIVYLLSFFLTNKEMDSLKANLTGFKGKVDRESGNSIKYMA |
| | | TQRIYSFHTYRGLKQKIRTSEEGVKETLLMQMIDELSKVPNVVY |
| | | QHLSTTQQNSFIEDWNEYYKDYEDDVETDDLSRVIHPVIRKRYE |
| | | DRFNYFAIRFLDEFFDFPTLRFQVHLGDYVHDRRTKQLGKVESD |
| | | RIIKEKVTVFARLKDINSAKASYFHSLEEQDKEELDNKWTLFPN |
| | | PSYDFPKEHTLQHQGEQKNAGKIGIYVKLRDTQYKEKAALEEA |
| | | RKSLNPKERSATKASKYDIITQIIEANDNVKSEKPLVFTGQPIAY |
| | | LSMNDIHSMLFSLLTDNAELKKTPEEVEAKLIDQIGKQINEILSK |
| | | DTDTKILKKYKDNDLKETDTDKITRDLARDKEEIEKLILEQKQR |
| | | ADDYNYTSSTKFNIDKSRKRKHLLFNAEKGKIGVWLANDIKRF |
| | | MFKESKSKWKGYQHTELQKLFAYFDTSKSDLELILSNMVMVK |
| | | DYPIELIDLVKKSRTLVDFLNKYLEARLEYIENVITRVKNSIGTP |
| | | QFKTVRKECFTFLKKSNYTVVSLDKQVERILSMPLFIERGFMDD |
| | | KPTMLEGKSYKQHKEKFADWFVHYKENSNYQNFYDTEVYEIT |
| | | TEDKREKAKVTKKIKQQQKNDVFTLMMVNYMLEEVLKLSSND |
| | | RLSLNELYQTKEERIVNKQVAKDTQERNKNYIWNKVVDLQLC |
| | | DGLVHIDNVKLKDIGNFRKYENDSRVKEFLTYQSDIVWSAYLS |
| | | NEVDSNKLYVIERQLDNYESIRSKELLKEVQEIECSVYNQVANK |
| | | ESLKQSGNENFKQYVLQGLLPIGMDVREMLILSTDVKFKKEEII |
| | | QLGQAGEVEQDLYSLIYIRNKFAHNQLPIKEFFDFCENNYRSISD |
| | | NEYYAEYYMEIFRSIKEKYAN |
| Prevotella | 12 | MEDDKKTTDSIRYELKDKHFWAAFLNLARHNVYITVNHINKIL |
| intermedia | (SEQ | EEDEINRDGYENTLENSWNEIKDINKKDRLSKLIIKHFPFLEATT |
| | ID No. | YRQNPTDTTKQKEEKQAEAQSLESLKKSFFVFIYKLRDLRNHYS |
| | 112) | HYKHSKSLERPKFEEDLQNKMYNIFDVSIQFVKEDYKHNTDINP |
| | | KKDFKHLDRKRKGKFHYSFADNEGNITESGLLFFVSLFLEKKDA |
| | | IWVQKKLEGFKCSNKSYQKMTNEVFCRSRMLLPKLRLESTQTQ |
| | | DWILLDMLNELIRCPKSLYERLQGVNRKKFYVSFDPADEDYDA |
| | | EQEPFKNTLVRHQDRFPYFALRYFDYNEVFANLRFQIDLGTYHF |
| | | SIYKKLIGGQKEDRHLTHKLYGFERIQEFDKQNRPDEWKAIVKD |
| | | SDTFKKKEEKEEEKPYISETTPHYHLENKKIGIAFKNHNIWPSTQ |
| | | TELTNNKRKKYNLGTSIKAEAFLSVHELLPMMFYYLLLKTENT |
| | | KNDNKVGGKKETKKQGKHKIEAIIESKIKDIYALYDAFANGEIN |
| | | SEDELKEYLKGKDIKIVHLPKQMIAILKNEHKDMAEKAEAKQE |
| | | KMKLATENRLKTLDKQLKGKIQNGKRYNSAPKSGEIASWLVN |
| | | DMMRFQPVQKDENGESLNNSKANSTEYQLLQRTLAFFGSEHER |
| | | LAPYFKQTKLIESSNPHPFLNDTEWEKCSNILSFYRSYLKARKNF |
| | | LESLKPEDWEKNQYFLMLKEPKTNRETLVQGWKNGFNLPRGFF |
| | | TEPIRKWFMEHWKSIKVDDLKRVGLVAKVTPLFFSEKYKDSVQ |
| | | PFYNYPFNVGDVNKPKEEDFLHREERIELWDKKKDKFKGYKA |
| | | KKKFKEMTDKEKEEHRSYLEFQSWNKFERELRLVRNQDIVTWL |
| | | LCTELIDKLKIDELNIKELKKLRLKDINTDTAKKEKNNILNRVMP |
| | | MELPVTVYKVNKGGYIIKNKPLHTIYIKEAETKLLKQGNFKALV |
| | | KDRRLNGLFSFVKTPSEAESESNPISKLRVEYELGKYQNARLDII |
| | | EDMLALEKKLIDKYNSLDTDNFHNMLTGWLELKGEAKKARFQ |
| | | NDVKLLTAVRNAFSHNQYPMYDENLFGNIERFSLSSSNIIESKGL |
| | | DIAAKLKEEVSKAAKKIQNEEDNKKEKET |
| Capnocytophaga | 13 | MKNIQRLGKGNEFSPFKKEDKFYFGGFLNLANNNIEDFFKEIITR |
| canimorsus | (SEQ | FGIVITDENKKPKETFGEKILNEIFKKDISIVDYEKWVNIFADYFP |
| | ID No. | FTKYLSLYLEEMQFKNRVICFRDVMKELLKTVEALRNFYTHYD |
| | 113) | HEPIKIEDRVFYFLDKVLLDVSLTVKNKYLKTDKTKEFLNQHIG |
| | | EELKELCKQRKDYLVGKGKRIDKESEIINGIYNNAFKDFICKREK |
| | | QDDKENHNSVEKILCNKEPQNKKQKSSATVWELCSKSSSKYTE |
| | | KSFPNRENDKHCLEVPISQKGIVFLLSFFLNKGEIYALTSNIKGFK |
| | | AKITKEEPVTYDKNSIRYMATHRMFSFLAYKGLKRKIRTSEINY |
| | | NEDGQASSTYEKETLMLQMLDELNKVPDVVYQNLSEDVQKTFI |
| | | EDWNEYLKENNGDVGTMEEEQVIHPVIRKRYEDKFNYFAIRFL |
| | | DEFAQFPTLRFQVHLGNYLCDKRTKQICDTTTEREVKKKITVFG |
| | | RLSELENKKAIFLNEREEIKGWEVFPNPSYDFPKENISVNYKDFP |
| | | IVGSILDREKQPVSNKIGIRVKIADELQREIDKAIKEKKLRNPKNR |
| | | KANQDEKQKERLVNEIVSTNSNEQGEPVVFIGQPTAYLSMNDIH |
| | | SVLYEFLINKISGEALETKIVEKIETQIKQIIGKDATTKILKPYTNA |
| | | NSNSINREKLLRDLEQEQQILKTLLEEQQQREKDKKDKKSKRK |
| | | HELYPSEKGKVAVWLANDIKRFMPKAFKEQWRGYHHSLLQKY |
| | | LAYYEQSKEELKNLLPKEVFKHFPFKLKGYFQQQYLNQFYTDY |
| | | LKRRLSYVNELLLNIQNFKNDKDALKATEKECFKFFRKQNYIIN |
| | | PINIQIQSILVYPIFLKRGFLDEKPTMIDREKFKENKDTELADWF |
| | | MHYKNYKEDNYQKFYAYPLEKVEEKEKFKRNKQINKQKKND |
| | | VYTLMMVEYIIQKIFGDKFVEENPLVLKGIFQSKAERQQNNTHA |
| | | ATTQERNLNGILNQPKDIKIQGKITVKGVKLKDIGNFRKYEIDQR |
| | | VNTFLDYEPRKEWMAYLPNDWKEKEKQGQLPPNNVIDRQISK |
| | | YETVRSKILLKDVQELEKIISDEIKEEHRHDLKQGKYYNFKYYIL |
| | | NGLLRQLKNENVENYKVFKLNTNPEKVNITQLKQEATDLEQKA |
| | | FVLTYIRNKFAHNQLPKKEFWDYCQEKYGKIEKEKTYAEYFAE |
| | | VFKREKEALIK |
| Porphyromonas | 14 | MTEQSERPYNGTYYTLEDKHFWAAFLNLARHNAYITLTHIDRQ |
| gulae | (SEQ | LAYSKADITNDQDVLSFKALWKNFDNDLERKSRLRSLILKHFSF |
| | ID No. | LEGAAYGKKLFESKSSGNKSSKNKELTKKEKEELQANALSLDN |
| | 114) | LKSILFDFLQKLKDFRNYYSHYRHSGSSELPLFDGNMLQRLYNV |
| | | FDVSVQRVKIDHEHNDEVDPHYHFNHLVRKGKKDRYGHNDNP |
| | | SFKHHFVDGEGMVTEAGLLFFVSLFLEKRDAIWMQKKIRGFKG |
| | | GTETYQQMTNEVFCRSRISLPKLKLESLRMDDWMLLDMLNEL |
| | | VRCPKPLYDRLREDDRACFRVPVDILPDEDDTDGGGEDPFKNT |
| | | LVRHQDRFPYFALRYFDLKKVFTSLRFHIDLGTYHFAIYKKMIG |
| | | EQPEDRHLTRNLYGFGRIQDFAEEHRPEEWKRLVRDLDYFETG |
| | | DKPYISQTSPHYHIEKGKIGLRFMPEGQHLWPSPEVGTTRTGRS |
| | | KYAQDKRLTAEAFLSVHELMPMMFYYFLLREKYSEEVSAERV |
| | | QGRIKRVIEDVYAVYDAFARDEINTRDELDACLADKGIRRGHLP |
| | | RQMIAILSQEHKDMEEKIRKKLQEMMADTDHRLDMLDRQTDR |
| | | KIRIGRKNAGLPKSGVIADWLVRDMMRFQPVAKDASGKPLNNS |
| | | KANSTEYRMLQRALALFGGEKERLTPYFRQMNLTGGNNPHPFL |
| | | HETRWESHTNILSFYRSYLRARKAFLERIGRSDRVENRPFLLLKE |
| | | PKTDRQTLVAGWKGEFHLPRGIFTEAVRDCLIEMGHDEVASYK |
| | | EVGFMAKAVPLYFERACEDRVQPFYDSPFNVGNSLKPKKGRFL |
| | | SKEERAEEWERGKERFRDLEAWSYSAARRIEDAFAGIEYASPG |
| | | NKKKIEQLLRDLSLWEAFESKLKVRADRINLAKLKKEILEAQEH |
| | | PYHDFKSWQKFERELRLVKNQDIITWMMCRDLMEENKVEGLD |
| | | TGTLYLKDIRPNVQEQGSLNVLNRVKPMRLPVVVYRADSRGH |
| | | VHKEEAPLATVYIEERDTKLLKQGNFKSFVKDRRLNGLFSFVDT |
| | | GGLAMEQYPISKLRVEYELAKYQTARVCVFELTLRLEESLLTRY |
| | | PHLPDESFREMLESWSDPLLAKWPELHGKVRLLIAVRNAFSHN |
| | | QYPMYDEAVFSSIRKYDPSSPDAIEERMGLNIAHRLSEEVKQAK |
| | | ETVERIIQA |
| Prevotella | 15 | MNIPALVENQKKYFGTYSVMAMLNAQTVLDHIQKVADIEGEQ |
| sp. P5 -125 | (SEQ | NENNENLWFHPVMSHLYNAKNGYDKQPEKTMFIIERLQSYFPF |
| | ID No. | LKIMAENQREYSNGKYKQNRVEVNSNDIFEVLKRAFGVLKMY |
| | 115) | RDLTNHYKTYEEKLNDGCEFLTSTEQPLSGMINNYYTVALRNM |
| | | NERYGYKTEDLAFIQDKRFKFVKDAYGKKKSQVNTGFFLSLQD |
| | | YNGDTQKKLHLSGVGIALLICLFLDKQYINIFLSRLPIFSSYNAQS |
| | | EERRIIIRSFGINSIKLPKDRIHSEKSNKSVAMDMLNEVKRCPDEL |
| | | FTTLSAEKQSRFRIISDDHNEVLMKRSSDRFVPLLLQYIDYGKLF |
| | | DHIRFHVNMGKLRYLLKADKTCIDGQTRVRVIEQPLNGFGRLE |
| | | EAETMRKQENGTFGNSGIRIRDFENMKRDDANPANYPYIVDTY |
| | | THYILENNKVEMFINDKEDSAPLLPVIEDDRYVVKTIPSCRMSTL |
| | | EIPAMAFHMFLFGSKKTEKLIVDVHNRYKRLFQAMQKEEVTAE |
| | | NIASFGIAESDLPQKILDLISGNAHGKDVDAFIRLTVDDMLTDTE |
| | | RRIKRFKDDRKSIRSADNKMGKRGFKQISTGKLADFLAKDIVLF |
| | | QPSVNDGENKITGLNYRIMQSAIAVYDSGDDYEAKQQFKLMFE |
| | | KARLIGKGTTEPHPFLYKVFARSIPANAVEFYERYLIERKFYLTG |
| | | LSNEIKKGNRVDVPFIRRDQNKWKTPAMKTLGRIYSEDLPVELP |
| | | RQMFDNEIKSHLKSLPQMEGIDFNNANVTYLIAEYMKRVLDDD |
| | | FQTFYQWNRNYRYMDMLKGEYDRKGSLQHCFTSVEEREGLW |
| | | KERASRTERYRKQASNKIRSNRQMRNASSEEIETILDKRLSNSR |
| | | NEYQKSEKVIRRYRVQDALLFLLAKKTLTELADFDGERFKLKEI |
| | | MPDAEKGILSEIMPMSFTFEKGGKKYTITSEGMKLKNYGDFFVL |
| | | ASDKRIGNLLELVGSDIVSKEDIMEEFNKYDQCRPEISSIVFNLE |
| | | KWAFDTYPELSARVDREEKVDFKSILKILLNNKNINKEQSDILR |
| | | KIRNAFDHNNYPDKGVVEIKALPEIAMSIKKAFGEYAIMK |
| Flavobacterium | 16 | MENLNKILDKENEICISKIFNTKGIAAPITEKALDNIKSKQKNDL |
| branchiophilum | (SEQ | NKEARLHYFSIGHSFKQIDTKKVFDYVLIEELKDEKPLKFITLQK |
| | ID No. | DFFTKEFSIKLQKLINSIRNINNHYVHNFNDINLNKIDSNVFHFLK |
| | 116) | ESFELAIIEKYYKVNKKYPLDNEIVLFLKELFIKDENTALLNYFT |
| | | NLSKDEAIEYILTFTITENKIWNINNEHNILNIEKGKYLTFEAMLF |
| | | LITIFLYKNEANHLLPKLYDFKNNKSKQELFTFFSKKFTSQDIDA |
| | | EEGHLIKFRDMIQYLNHYPTAWNNDLKLESENKNKIMTTKLIDS |
| | | IIEFELNSNYPSFATDIQFKKEAKAFLFASNKKRNQTSFSNKSYN |
| | | EEIRHNPHIKQYRDEIASALTPISFNVKEDKFKIFVKKHVLEEYFP |
| | | NSIGYEKFLEYNDFTEKEKEDFGLKLYSNPKTNKLIERIDNHKL |
| | | VKSHGRNQDRFMDFSMRFLAENNYFGKDAFFKCYKFYDTQEQ |
| | | DEFLQSNENNDDVKFHKGKVTTYIKYEEHLKNYSYWDCPFVEE |
| | | NNSMSVKISIGSEEKILKIQRNLMIYFLENALYNENVENQGYKL |
| | | VNNYYRELKKDVEESIASLDLIKSNPDFKSKYKKILPKRLLHNY |
| | | APAKQDKAPENAFETLLKKADFREEQYKKLLKKAEHEKNKED |
| | | FVKRNKGKQFKLHFIRKACQMMYFKEKYNTLKEGNAAFEKKD |
| | | PVIEKRKNKEHEFGHHKNLNITREEFNDYCKWMFAFNGNDSYK |
| | | KYLRDLFSEKHFFDNQEYKNLFESSVNLEAFYAKTKELFKKWIE |
| | | TNKPTNNENRYTLENYKNLILQKQVFINVYHFSKYLIDKNLLNS |
| | | ENNVIQYKSLENVEYLISDFYFQSKLSIDQYKTCGKLFNKLKSN |
| | | KLEDCLLYEIAYNYIDKKNVHKIDIQKILTSKIILTINDANTPYKIS |
| | | VPFNKLERYTEMIAIKNQNNLKARFLIDLPLYLSKNKIKKGKDS |
| | | AGYEIIIKNDLEIEDINTINNKIINDSVKFTEVLMELEKYFILKDKC |
| | | ILSKNYIDNSEIPSLKQFSKVWIKENENEIINYRNIACHFHLPLLET |
| | | FDNLLLNVEQKFIKEELQNVSTINDLSKPQEYLILLFIKFKHNNF |
| | | YLNLFNKNESKTIKNDKEVKKNRVLQKFINQVILKKK |
| Myroides | 17 | MKDILTTDTTEKQNRFYSHKIADKYFFGGYFNLASNNIYEVFEE |
| odoratimimus | (SEQ | VNKRNTFGKLAKRDNGNLKNYIIHVFKDELSISDFEKRVAIFAS |
| | ID No. | YFPILETVDKKSIKERNRTIDLTLSQRIRQFREMLISLVTAVDQLR |
| | 117) | NFYTHYHHSDIVIENKVLDFLNSSFVSTALHVKDKYLKTDKTKE |
| | | FLKETIAAELDILIEAYKKKQIEKKNTRFKANKREDILNAIYNEA |
| | | FWSFINDKDKDKDKETVVAKGADAYFEKNHHKSNDPDFALNIS |
| | | EKGIVYLLSFFLTNKEMDSLKANLTGFKGKVDRESGNSIKYMA |
| | | TQRIYSFHTYRGLKQKIRTSEEGVKETLLMQMIDELSKVPNVVY |
| | | QHLSTTQQNSFIEDWNEYYKDYEDDVETDDLSRVTHPVIRKRY |
| | | EDRFNYFAIRFLDEFFDFPTLRFQVHLGDYVHDRRTKQLGKVES |
| | | DRIIKEKVTVFARLKDINSAKASYFHSLEEQDKEELDNKWTLFP |
| | | NPSYDFPKEHTLQHQGEQKNAGKIGIYVKLRDTQYKEKAALEE |
| | | ARKSLNPKERSATKASKYDIITQIIEANDNVKSEKPLVFTGQPIA |
| | | YLSMNDIHSMLFSLLTDNAELKKTPEEVEAKLIDQIGKQINEILS |
| | | KDTDTKILKKYKDNDLKETDTDKITRDLARDKEEIEKLILEQKQ |
| | | RADDYNYTSSTKFNIDKSRKRKHLLFNAEKGKIGVWLANDIKR |
| | | FMFKESKSKWKGYQHIELQKLFAYFDTSKSDLELILSNMVMVK |
| | | DYPIELIDLVKKSRTLVDFLNKYLEARLEYIENVITRVKNSIGTP |
| | | QFKTVRKECFTFLKKSNYTVVSLDKQVERILSMPLFIERGFMDD |
| | | KPTMLEGKSYKQHKEKFADWFVHYKENSNYQNFYDTEVYEIT |
| | | TEDKREKAKVTKKIKQQQKNDVFTLMMVNYMLEEVLKLSSND |
| | | RLSLNELYQTKEERIVNKQVAKDTQERNKNYIWNKVVDLQLC |
| | | DGLVHIDNVKLKDIGNFRKYENDSRVKEFLTYQSDIVWSAYLS |
| | | NEVDSNKLYVIERQLDNYESIRSKELLKEVQEIECSVYNQVANK |
| | | ESLKQSGNENFKQYVLQGLLPIGMDVREMLILSTDVKFKKEEII |
| | | QLGQAGEVEQDLYSLIYIRNKFAHNQLPIKEFFDFCENNYRSISD |
| | | NEYYAEYYMEIFRSIKEKYAN |
| Flavobacterium | 18 | MSSKNESYNKQKTFNHYKQEDKYFFGGFLNNADDNLRQVGKE |
| columnare | (SEQ | FKTRINFNRNNNELASVFKDYFNKEKSVAKREHALNLLSNYFP |
| | ID No. | VLERIQKHTNHNFEQTREIFELLLDTIKKLRDYYTHHYHKPITIN |
| | 118) | PKIYDFLDDTLLDVLITIKKKKVKNDTSRELLKEKLRPELTQLKN |
| | | QKREELIKKGKKLLEENLENAVFNHCLIPFLEENKTDDKQNKTV |
| | | SLRKYRKSKPNEETSITLTQSGLVFLMSFFLHRKEFQVFTSGLER |
| | | FKAKVNTIKEEEISLNKNNIVYMITHWSYSYYNFKGLKHRIKTD |
| | | QGVSTLEQNNTTHSLTNTNTKEALLTQIVDYLSKVPNEIYETLSE |
| | | KQQKEFEEDINEYMRENPENEDSTFSSIVSHKVIRKRYENKFNY |
| | | FAMRFLDEYAELPTLRFMVNFGDYIKDRQKKILESIQFDSERIIK |
| | | KEIHLFEKLSLVTEYKKNVYLKETSNIDLSRFPLFPNPSYVMAN |
| | | NNIPFYIDSRSNNLDEYLNQKKKAQSQNKKRNLTFEKYNKEQS |
| | | KDAIIAMLQKEIGVKDLQQRSTIGLLSCNELPSMLYEVIVKDIKG |
| | | AELENKIAQKIREQYQSIRDFTLDSPQKDNIPTTLIKTINTDSSVT |
| | | FENQPIDIPRLKNALQKELTLTQEKLLNVKEHEIEVDNYNRNKN |
| | | TYKFKNQPKNKVDDKKLQRKYVFYRNEIRQEANWLASDLIHF |
| | | MKNKSLWKGYMHNELQSFLAFFEDKKNDCIALLETVFNLKED |
| | | CILTKGLKNLFLKHGNFIDFYKEYLKLKEDFLSTESTFLENGFIG |
| | | LPPKILKKELSKRLKYIFIVFQKRQFIIKELEEKKNNLYADAINLS |
| | | RGIFDEKPTMIPFKKPNPDEFASWFVASYQYNNYQSFYELTPDI |
| | | VERDKKKKYKNLRAINKVKIQDYYLKLMVDTLYQDLFNQPLD |
| | | KSLSDFYVSKAEREKIKADAKAYQKLNDSSLWNKVIHLSLQNN |
| | | RITANPKLKDIGKYKRALQDEKIATLLTYDARTWTYALQKPEK |
| | | ENENDYKELHYTALNMELQEYEKVRSKELLKQVQELEKKILDK |
| | | FYDFSNNASHPEDLEIEDKKGKRHPNFKLYITKALLKNESEIINL |
| | | ENIDIEILLKYYDYNTEELKEKIKNMDEDEKAKIINTKENYNKIT |
| | | NVLIKKALVLIIIRNKMAHNQYPPKFIYDLANRFVPKKEEEYFAT |
| | | YFNRVFETITKELWENKEKKDKTQV |
| Porphyromonas | 19 | MTEQNEKPYNGTYYTLEDKHFWAAFLNLARHNAYITLAHIDR |
| gingivalis | (SEQ | QLAYSKADITNDEDILFFKGQWKNLDNDLERKARLRSLILKHFS |
| | ID No. | FLEGAAYGKKLFESQSSGNKSSKKKELSKKEKEELQANALSLD |
| | 119) | NLKSILFDFLQKLKDFRNYYSHYRHPESSELPLFDGNMLQRLYN |
| | | VFDVSVQRVKRDHEHNDKVDPHRHFNHLVRKGKKDKYGNND |
| | | NPFFKHHFVDREGTVTEAGLLFFVSLFLEKRDAIWMQKKIRGFK |
| | | GGTEAYQQMTNEVFCRSRISLPKLKLESLRTDDWMLLDMLNEL |
| | | VRCPKSLYDRLREEDRARFRVPVDILSDEDDTDGTEEDPFKNTL |
| | | VRHQDRFPYFALRYFDLKKVFTSLRFHIDLGTYHFAIYKKNIGE |
| | | QPEDRHLTRNLYGFGRIQDFAEEHRPEEWKRLVRDLDYFETGD |
| | | KPYITQTTPHYHIEKGKIGLRFVPEGQHLWPSPEVGATRTGRSK |
| | | YAQDKRLTAEAFLSVHELMPMMFYYFLLREKYSEEVSAEKVQ |
| | | GRIKRVIEDVYAVYDAFARDEINTRDELDACLADKGIRRGHLPR |
| | | QMIAILSQEHKDMEEKVRKKLQEMIADTDHRLDMLDRQTDRKI |
| | | RIGRKNAGLPKSGVVADWLVRDMMRFQPVAKDTSGKPLNNSK |
| | | ANSTEYRMLQRALALFGGEKERLTPYFRQMNLTGGNNPHPFLH |
| | | ETRWESHTNILSFYRSYLEARKAFLQSIGRSDRVENHRFLLLKEP |
| | | KTDRQTLVAGWKGEFHLPRGIFTEAVRDCLIEMGYDEVGSYKE |
| | | VGFMAKAVPLYFERASKDRVQPFYDYPFNVGNSLKPKKGRFLS |
| | | KEKRAEEWESGKERFRLAKLKKEILEAKEHPYHDFKSWQKFER |
| | | ELRLVKNQDIITWMMCRDLMEENKVEGLDTGTLYLKDIRTDV |
| | | QEQGSLNVLNRVKPMRLPVVVYRADSRGHVHKEQAPLATVYI |
| | | EERDTKLLKQGNFKSFVKDRRLNGLFSFVDTGALAMEQYPISK |
| | | LRVEYELAKYQTARVCAFEQTLELEESLLTRYPHLPDKNFRKM |
| | | LESWSDPLLDKWPDLHGNVRLLIAVRNAFSHNQYPMYDETLFS |
| | | SIRKYDPSSPDAIEERMGLNIAHRLSEEVKQAKEMVERIIQA |
| Porphyromonas | 20 | MTEQSERPYNGTYYTLEDKHFWAAFLNLARHNAYITLTHIDRQ |
| sp. | (SEQ | LAYSKADITNDQDVLSFKALWKNFDNDLERKSRLRSLILKHFSF |
| COT-052 | ID No. | LEGAAYGKKLFESKSSGNKSSKNKELTKKEKEELQANALSLDN |
| OH4946 | 120) | LKSILFDFLQKLKDFRNYYSHYRHSESSELPLFDGNMLQRLYNV |
| | | FDVSVQRVKRDHEHNDKVDPHRHFNHLVRKGKKDRYGHNDN |
| | | PSFKHHFVDSEGMVTEAGLLFFVSLFLEKRDAIWMQKKIRGFK |
| | | GGTETYQQMTNEVFCRSRISLPKLKLESLRTDDWMLLDMLNEL |
| | | VRCPKPLYDRLREDDRACFRVPVDILPDEDDTDGGGEDPFKNT |
| | | LVRHQDRFPYFALRYFDLKKVFTSLRFHIDLGTYHFAIYKKMIG |
| | | EQPEDRHLTRNLYGFGRIQDFAEEHRPEEWKRLVRDLDYFETG |
| | | DKPYISQTTPHYHIEKGKIGLRFVPEGQHLWPSPEVGTTRTGRSK |
| | | YAQDKRLTAEAFLSVHELMPMMFYYFLLREKYSEEVSAEKVQ |
| | | GRIKRVIEDVYAIYDAFARDEINTLKELDACLADKGIRRGHLPK |
| | | QMIGILSQERKDMEEKVRKKLQEMIADTDHRLDMLDRQTDRKI |
| | | RIGRKNAGLPKSGVIADWLVRDMMRFQPVAKDTSGKPLNNSK |
| | | ANSTEYRMLQRALALFGGEKERLTPYFRQMNLTGGNNPHPFLH |
| | | ETRWESHTNILSFYRSYLRARKAFLERIGRSDRVENCPFLLLKEP |
| | | KTDRQTLVAGWKGEFHLPRGIFTEAVRDCLIEMGYDEVGSYRE |
| | | VGFMAKAVPLYFERACEDRVQPFYDSPFNVGNSLKPKKGRFLS |
| | | KEDRAEEWERGKERFRDLEAWSHSAARRIKDAFAGIEYASPGN |
| | | KKKIEQLLRDLSLWEAFESKLKVRADKINLAKLKKEILEAQEHP |
| | | YHDFKSWQKFERELRLVKNQDIITWMMCRDLMEENKVEGLDT |
| | | GTLYLKDIRPNVQEQGSLNVLNRVKPMRLPVVVYRADSRGHV |
| | | HKEEAPLATVYIEERDTKLLKQGNFKSFVKDRRLNGLFSFVDTG |
| | | GLAMEQYPISKLRVEYELAKYQTARVCVFELTLRLEESLLSRYP |
| | | HLPDESFREMLESWSDPLLAKWPELHGKVRLLIAVRNAFSHNQ |
| | | YPMYDEAVFSSIRKYDPSSPDAIEERMGLNIAHRLSEEVKQAKE |
| | | TVERIIQA |
| Prevotella | 21 (SEQ | MEDDKKTKESTNMLDNKHFWAAFLNLARHNVYITVNHINKVL |
| intermedia | ID No. | ELKNKKDQDIIIDNDQDILAIKTHWEKVNGDLNKTERLRELMTK |
| | 121) | HFPFLETAIYTKNKEDKEEVKQEKQAKAQSFDSLKHCLFLFLEK |
| | | LQEARNYYSHYKYSESTKEPMLEKELLKKMYNIFDDNIQLVIK |
| | | DYQHNKDINPDEDFKHLDRTEEEFNYYFTTNKKGNITASGLLFF |
| | | VSLFLEKKDAIWMQQKLRGFKDNRESKKKMTHEVFCRSRMLL |
| | | PKLRLESTQTQDWILLDMLNELIRCPKSLYERLQGEYRKKFNVP |
| | | FDSADEDYDAEQEPFKNTLVRHQDRFPYFALRYFDYNEIFTNLR |
| | | FQIDLGTYHFSIYKKLIGGQKEDRHLTHKLYGFERIQEFAKQNR |
| | | TDEWKAIVKDFDTYETSEEPYISETAPHYHLENQKIGIRFRNDN |
| | | DEIWPSLKTNGENNEKRKYKLDKQYQAEAFLSVHELLPMMFY |
| | | YLLLKKEEPNNDKKNASIVEGFIKREIRDIYKLYDAFANGEINNI |
| | | DDLEKYCEDKGIPKRHLPKQMVAILYDEHKDMAEEAKRKQKE |
| | | MVKDTKKLLATLEKQTQGEIEDGGRNIRLLKSGEIARWLVNDM |
| | | MRFQPVQKDNEGNPLNNSKANSTEYQMLQRSLALYNKEEKPT |
| | | RYFRQVNLINSSNPHPFLKWTKWEECNNILSFYRSYLTKKIEFLN |
| | | KLKPEDWEKNQYFLKLKEPKTNRETLVQGWKNGFNLPRGIFTE |
| | | PIREWFKRHQNDSEEYEKVETLDRVGLVTKVIPLFFKKEDSKDK |
| | | EEYLKKDAQKEINNCVQPFYGFPYNVGNIHKPDEKDFLPSEERK |
| | | KLWGDKKYKFKGYKAKVKSKKLTDKEKEEYRSYLEFQSWNK |
| | | FERELRLVRNQDIVTWLLCTELIDKLKVEGLNVEELKKLRLKDI |
| | | DTDTAKQEKNNILNRVMPMQLPVTVYEIDDSHNIVKDRPLHTV |
| | | YIEETKTKLLKQGNFKALVKDRRLNGLFSFVDTSSETELKSNPIS |
| | | KSLVEYELGEYQNARIETIKDMLLLEETLIEKYKTLPTDNFSDM |
| | | LNGWLEGKDEADKARFQNDVKLLVAVRNAFSHNQYPMRNRIA |
| | | FANINPFSLSSADTSEEKKLDIANQLKDKTHKIIKRIIEIEKPIETK |
| | | E |
| PIN17_0200 | AFJ075 | MKMEDDKKTKESTNMLDNKHFWAAFLNLARHNVYITVNHIN |
| [Prevotella | 23 | KVLELKNKKDQDIIIDNDQDILAIKTHWEKVNGDLNKTERLREL |
| intermedia | (SEQ | MTKHFPFLETAIYTKNKEDKEEVKQEKQAKAQSFDSLKHCLFL |
| 17] | ID No. | FLEKLQEARNYYSHYKYSESTKEPMLEKELLKKMYNIFDDNIQ |
| | 122) | LVIKDYQHNKDINPDEDFKHLDRTEEEFNYYFTTNKKGNITASG |
| | | LLFFVSLFLEKKDAIWMQQKLRGFKDNRESKKKMTHEVFCRSR |
| | | MLLPKLRLESTQTQDWILLDMLNELIRCPKSLYERLQGEYRKKF |
| | | NVPFDSADEDYDAEQEPFKNTLVRHQDRFPYFALRYFDYNEIFT |
| | | NLRFQIDLGTYHFSIYKKLIGGQKEDRHLTHKLYGFERIQEFAK |
| | | QNRTDEWKAIVKDFDTYETSEEPYISETAPHYHLENQKIGIRFRN |
| | | DNDEIWPSLKTNGENNEKRKYKLDKQYQAEAFLSVHELLPMM |
| | | FYYLLLKKEEPNNDKKNASIVEGFIKREIRDIYKLYDAFANGEIN |
| | | NIDDLEKYCEDKGIPKRHLPKQMVAILYDEHKDMAEEAKRKQ |
| | | KEMVKDTKKLLATLEKQTQGEIEDGGRNIRLLKSGEIARWLVN |
| | | DMMRFQPVQKDNEGNPLNNSKANSTEYQMLQRSLALYNKEEK |
| | | PTRYFRQVNLINSSNPHPFLKWTKWEECNNILSFYRSYLTKKIEF |
| | | LNKLKPEDWEKNQYFLKLKEPKTNRETLVQGWKNGFNLPRGIF |
| | | TEPIREWFKRHQNDSEEYEKVETLDRVGLVTKVIPLFFKKEDSK |
| | | DKEEYLKKDAQKEINNCVQPFYGFPYNVGNIHKPDEKDFLPSEE |
| | | RKKLWGDKKYKFKGYKAKVKSKKLTDKEKEEYRSYLEFQSW |
| | | NKFERELRLVRNQDIVTWLLCTELIDKLKVEGLNVEELKKLRLK |
| | | DIDTDTAKQEKNNILNRVMPMQLPVTVYEIDDSHNIVKDRPLHT |
| | | VYIEETKTKLLKQGNFKALVKDRRLNGLFSFVDTSSETELKSNPI |
| | | SKSLVEYELGEYQNARIETIKDMLLLEETLIEKYKTLPTDNFSDM |
| | | LNGWLEGKDEADKARFQNDVKLLVAVRNAFSHNQYPMRNRIA |
| | | FANINPFSLSSADTSEEKKLDIANQLKDKTHKIIKRIIEIEKPIETK |
| | | E |
| Prevotella | BAU18 | MEDDKKTTDSISYELKDKHFWAAFLNLARHNVYITVNHINKVL |
| intermedia | 623 | ELKNKKDQDIIIDNDQDILAIKTHWEKVNGDLNKTERLRELMTK |
| | (SEQ | HFPFLETAIYSKNKEDKEEVKQEKQAKAQSFDSLKHCLFLFLEK |
| | ID No. | LQETRNYYSHYKYSESTKEPMLEKELLKKMYNIFDDNIQLVIKD |
| | 123) | YQHNKDINPDEDFKHLDRTEEDFNYYFTRNKKGNITESGLLFFV |
| | | SLFLEKKDAIWMQQKLRGFKDNRESKKKMTHEVFCRSRMLLP |
| | | KLRLESTQTQDWILLDMLNELIRCPKSLYERLQGEDREKFKVPF |
| | | DPADEDYDAEQEPFKNTLVRHQDRFPYFALRYFDYNEIFTNLRF |
| | | QIDLGTFHFSIYKKLIGGQKEDRHLTHKLYGFERIQEFAKQNRPD |
| | | EWKAIVKDLDTYETSNERYISETTPHYHLENQKIGIRFRNDNDEI |
| | | WPSLKTNGENNEKSKYKLDKQYQAEAFLSVHELLPMMFYYLL |
| | | LKKEEPNNDKKNASIVEGFIKREIRDMYKLYDAFANGEINNIDD |
| | | LEKYCEDKGIPKRHLPKQMVAILYDEHKDMVKEAKRKQRKMV |
| | | KDTEKLLAALEKQTQEKTEDGGRNIRLLKSGEIARWLVNDMM |
| | | RFQPVQKDNEGNPLNNSKANSTEYQMLQRSLALYNKEEKPTRY |
| | | FRQVNLINSSNPHPFLKWTKWEECNNILSFYRSYLTKKIEFLNKL |
| | | KPEDWEKNQYFLKLKEPKTNRETLVQGWKNGFNLPRGIFTEPIR |
| | | EWFKRHQNDSKEYEKVEALDRVGLVTKVIPLFFKKEDSKDKEE |
| | | DLKKDAQKEINNCVQPFYSFPYNVGNIHKPDEKDFLHREERIEL |
| | | WDKKKDKFKGYKAKVKSKKLTDKEKEEYRSYLEFQSWNKFER |
| | | ELRLVRNQDIVTWLLCTELIDKLKVEGLNVEELKKLRLKDIDTD |
| | | TAKQEKNNILNRVMPMQLPVTVYEIDDSHNIVKDRPLHTVYIEE |
| | | TKTKLLKQGNFKALVKDRRLNGLFSFVDTSSEAELKSNPISKSL |
| | | VEYELGEYQNARIETIKDMLLLEETLIEKYKNLPTDNFSDMLNG |
| | | WLEGKDEADKARFQNDVKLLVAVRNAFSHNQYPMRNRIAFAN |
| | | INPFSLSSADTSEEKKLDIANQLKDKTHKIIKRIIEIEKPIETKE |
| HMPREF6 | EFU31 | MQKQDKLFVDRKKNAIFAFPKYITIMENKEKPEPIYYELTDKHF |
| 485_0083 | 981 | WAAFLNLARHNVYTTINHINRRLEIAELKDDGYMMGIKGSWNE |
| [Prevotella | (SEQ | QAKKLDKKVRLRDLIMKHFPFLEAAAYEMTNSKSPNNKEQRE |
| buccae | ID No. | KEQSEALSLNNLKNVLFIFLEKLQVLRNYYSHYKYSEESPKPIFE |
| ATCC | 124) | TSLLKNMYKVFDANVRLVKRDYMHHENIDMQRDFTHLNRKK |
| 33574] | | QVGRTKNIIDSPNFHYHFADKEGNMTIAGLLFFVSLFLDKKDAI |
| | | WMQKKLKGFKDGRNLREQMTNEVFCRSRISLPKLKLENVQTK |
| | | DWMQLDMLNELVRCPKSLYERLREKDRESFKVPFDIFSDDYNA |
| | | EEEPFKNTLVRHQDRFPYFVLRYFDLNEIFEQLRFQIDLGTYHFS |
| | | IYNKRIGDEDEVRHLTHHLYGFARIQDFAPQNQPEEWRKLVKD |
| | | LDHFETSQEPYISKTAPHYHLENEKIGIKFCSAHNNLFPSLQTDK |
| | | TCNGRSKFNLGTQFTAEAFLSVHELLPMMFYYLLLTKDYSRKE |
| | | SADKVEGIIRKEISNIYAIYDAFANNEINSIADLTRRLQNTNILQG |
| | | HLPKQMISILKGRQKDMGKEAERKIGEMIDDTQRRLDLLCKQT |
| | | NQKIRIGKRNAGLLKSGKIADWLVNDMMRFQPVQKDQNNIPIN |
| | | NSKANSTEYRMLQRALALFGSENFRLKAYFNQMNLVGNDNPH |
| | | PFLAETQWEHQTNILSFYRNYLEARKKYLKGLKPQNWKQYQH |
| | | FLILKVQKTNRNTLVTGWKNSFNLPRGIFTQPIREWFEKHNNSK |
| | | RIYDQILSFDRVGFVAKAIPLYFAEEYKDNVQPFYDYPFNIGNRL |
| | | KPKKRQFLDKKERVELWQKNKELFKNYPSEKKKTDLAYLDFLS |
| | | WKKFERELRLIKNQDIVTWLMFKELFNMATVEGLKIGEIHLRDI |
| | | DTNTANEESNNILNRIMPMKLPVKTYETDNKGNILKERPLATFY |
| | | IEETETKVLKQGNFKALVKDRRLNGLFSFAETTDLNLEEHPISKL |
| | | SVDLELIKYQTTRISIFEMTLGLEKKLIDKYSTLPTDSFRNMLER |
| | | WLQCKANRPELKNYVNSLIAVRNAFSHNQYPMYDATLFAEVK |
| | | KFTLFPSVDTKKIELNIAPQLLEIVGKAIKEIEKSENKN |
| HMPREF9 | EGQ18 | MKEEEKGKTPVVSTYNKDDKHFWAAFLNLARHNVYITVNHIN |
| 144_1146 | 444 | KILGEGEINRDGYENTLEKSWNEIKDINKKDRLSKLIIKHFPFLE |
| [Prevotella | (SEQ | VTTYQRNSADTTKQKEEKQAEAQSLESLKKSFFVFIYKLRDLRN |
| pallens | ID No. | HYSHYKHSKSLERPKFEEDLQEKMYNIFDASIQLVKEDYKHNT |
| ATCC | 125) | DIKTEEDFKHLDRKGQFKYSFADNEGNITESGLLFFVSLFLEKK |
| 700821] | | DAIWVQKKLEGFKCSNESYQKMTNEVFCRSRMLLPKLRLQSTQ |
| | | TQDWILLDMLNELIRCPKSLYERLREEDRKKFRVPIEIADEDYD |
| | | AEQEPFKNALVRHQDRFPYFALRYFDYNEIFTNLRFQIDLGTYH |
| | | FSIYKKQIGDYKESHHLTHKLYGFERIQEFTKQNRPDEWRKFVK |
| | | TFNSFETSKEPYIPETTPHYHLENQKIGIRFRNDNDKIWPSLKTNS |
| | | EKNEKSKYKLDKSFQAEAFLSVHELLPMMFYYLLLKTENTDND |
| | | NEIETKKKENKNDKQEKHKIEEIIENKITEIYALYDAFANGKINSI |
| | | DKLEEYCKGKDIEIGHLPKQMIAILKSEHKDMATEAKRKQEEM |
| | | LADVQKSLESLDNQINEEIENVERKNSSLKSGEIASWLVNDMM |
| | | RFQPVQKDNEGNPLNNSKANSTEYQMLQRSLALYNKEEKPTRY |
| | | FRQVNLIESSNPHPFLNNTEWEKCNNILSFYRSYLEAKKNFLESL |
| | | KPEDWEKNQYFLMLKEPKTNCETLVQGWKNGFNLPRGIFTEPI |
| | | RKWFMEHRKNITVAELKRVGLVAKVIPLFFSEEYKDSVQPFYN |
| | | YLFNVGNINKPDEKNFLNCEERRELLRKKKDEFKKMTDKEKEE |
| | | NPSYLEFQSWNKFERELRLVRNQDIVTWLLCMELFNKKKIKEL |
| | | NVEKIYLKNINTNTTKKEKNTEEKNGEEKIIKEKNNILNRIMPMR |
| | | LPIKVYGRENFSKNKKKKIRRNTFFTVYIEEKGTKLLKQGNFKA |
| | | LERDRRLGGLFSFVKTHSKAESKSNTISKSRVEYELGEYQKARIE |
| | | IIKDMLALEETLIDKYNSLDTDNFHNMLTGWLKLKDEPDKASF |
| | | QNDVDLLIAVRNAFSHNQYPMRNRIAFANINPFSLSSANTSEEK |
| | | GLGIANQLKDKTHKTIEKIIEIEKPIETKE |
| HMPREF9 | EHO08 | MKDILTTDTTEKQNRFYSHKIADKYFFGGYFNLASNNIYEVFEE |
| 714_02132 | 761 | VNKRNTFGKLAKRDNGNLKNYIIHVFKDELSISDFEKRVAIFAS |
| [Myroides | (SEQ | YFPILETVDKKSIKERNRTIDLTLSQRIRQFREMLISLVTAVDQLR |
| odoratimimus | ID No. | NFYTHYHHSEIVIENKVLDFLNSSLVSTALHVKDKYLKTDKTKE |
| CCUG | 126) | FLKETIAAELDILIEAYKKKQIEKKNTRFKANKREDILNAIYNEA |
| 12901] | | FWSFINDKDKDKETVVAKGADAYFEKNHHKSNDPDFALNISEK |
| | | GIVYLLSFFLTNKEMDSLKANLTGFKGKVDRESGNSIKYMATQ |
| | | RIYSFHTYRGLKQKIRTSEEGVKETLLMQMIDELSKVPNVVYQH |
| | | LSTTQQNSFIEDWNEYYKDYEDDVETDDLSRVIHPVIRKRYEDR |
| | | FNYFAIRFLDEFFDFPTLRFQVHLGDYVHDRRTKQLGKVESDRII |
| | | KEKVTVFARLKDINSAKANYFHSLEEQDKEELDNKWTLFPNPS |
| | | YDFPKEHTLQHQGEQKNAGKIGIYVKLRDTQYKEKAALEEARK |
| | | SLNPKERSATKASKYDIITQIIEANDNVKSEKPLVFTGQPIAYLS |
| | | MNDIHSMLFSLLTDNAELKKTPEEVEAKLIDQIGKQINEILSKDT |
| | | DTKILKKYKDNDLKETDTDKITRDLARDKEEIEKLILEQKQRAD |
| | | DYNYTSSTKFNIDKSRKRKHLLFNAEKGKIGVWLANDIKRFMT |
| | | EEFKSKWKGYQHTELQKLFAYYDTSKSDLDLILSDMVMVKDY |
| | | PIELIALVKKSRTLVDFLNKYLEARLGYMENVITRVKNSIGTPQF |
| | | KTVRKECFTFLKKSNYTVVSLDKQVERILSMPLFIERGFMDDKP |
| | | TMLEGKSYQQHKEKFADWFVHYKENSNYQNFYDTEVYEITTE |
| | | DKREKAKVTKKIKQQQKNDVFTLMMVNYMLEEVLKLSSNDRL |
| | | SLNELYQTKEERIVNKQVAKDTQERNKNYIWNKVVDLQLCEG |
| | | LVRIDKVKLKDIGNFRKYENDSRVKEFLTYQSDIVWSAYLSNEV |
| | | DSNKLYVIERQLDNYESIRSKELLKEVQEIECSVYNQVANKESL |
| | | KQSGNENFKQYVLQGLVPIGMDVREMLILSTDVKFIKEEIIQLG |
| | | QAGEVEQDLYSLIYIRNKFAHNQLPIKEFFDFCENNYRSISDNEY |
| | | YAEYYMEIFRSIKEKYTS |
| HMPREF9 | EKB06 | MKDILTTDTTEKQNRFYSHKIADKYFFGGYFNLASNNIYEVFEE |
| 711_00870 | 014(SEQ | VNKRNTFGKLAKRDNGNLKNYIIHVFKDELSISDFEKRVAIFAS |
| [Myroides | ID | YFPILETVDKKSIKERNRTIDLTLSQRIRQFREMLISLVTAVDQLR |
| odoratimimus | No. | NFYTHYHHSEIVIENKVLDFLNSSLVSTALHVKDKYLKTDKTKE |
| CCUG | 127) | FLKETIAAELDILIEAYKKKQIEKKNTRFKANKREDILNAIYNEA |
| 3837] | | FWSFINDKDKDKETVVAKGADAYFEKNHHKSNDPDFALNISEK |
| | | GIVYLLSFFLTNKEMDSLKANLTGFKGKVDRESGNSIKYMATQ |
| | | RIYSFHTYRGLKQKIRTSEEGVKETLLMQMIDELSKVPNVVYQH |
| | | LSTTQQNSFIEDWNEYYKDYEDDVETDDLSRVIHPVIRKRYEDR |
| | | FNYFAIRFLDEFFDFPTLRFQVHLGDYVHDRRTKQLGKVESDRII |
| | | KEKVTVFARLKDINSAKASYFHSLEEQDKEELDNKWTLFPNPS |
| | | YDFPKEHTLQHQGEQKNAGKIGIYVKLRDTQYKEKAALEEARK |
| | | SLNPKERSATKASKYDIITQIIEANDNVKSEKPLVFTGQPIAYLS |
| | | MNDIHSMLFSLLTDNAELKKTPEEVEAKLIDQIGKQINEILSKDT |
| | | DTKILKKYKDNDLKETDTDKITRDLARDKEEIEKLILEQKQRAD |
| | | DYNYTSSTKFNIDKSRKRKHLLFNAEKGKIGVWLANDIKRFMF |
| | | KESKSKWKGYQHTELQKLFAYFDTSKSDLELILSDMVMVKDYP |
| | | IELIDLVRKSRTLVDFLNKYLEARLGYIENVITRVKNSIGTPQFKT |
| | | VRKECFAFLKESNYTVASLDKQIERILSMPLFIERGFMDSKPTML |
| | | EGKSYQQHKEDFADWFVHYKENSNYQNFYDTEVYEIITEDKRE |
| | | QAKVTKKIKQQQKNDVFTLMMVNYMLEEVLKLPSNDRLSLNE |
| | | LYQTKEERIVNKQVAKDTQERNKNYIWNKVVDLQLCEGLVRID |
| | | KVKLKDIGNFRKYENDSRVKEFLTYQSDIVWSGYLSNEVDSNK |
| | | LYVIERQLDNYESIRSKELLKEVQEIECIVYNQVANKESLKQSGN |
| | | ENFKQYVLQGLLPRGTDVREMLILSTDVKFKKEEIMQLGQVRE |
| | | VEQDLYSLIYIRNKFAHNQLPIKEFFDFCENNYRPISDNEYYAEY |
| | | YMEIFRSIKEKYAS |
| HMPREF9 | EKB54 | MENKTSLGNNIYYNPFKPQDKSYFAGYFNAAMENTDSVFRELG |
| 699_02005 | 193(SEQ | KRLKGKEYTSENFFDAIFKENISLVEYERYVKLLSDYFPMARLL |
| [Bergeyella | ID | DKKEVPIKERKENFKKNFKGIIKAVRDLRNFYTHKEHGEVEITD |
| zoohelcum | No. | EIFGVLDEMLKSTVLTVKKKKVKTDKTKEILKKSIEKQLDILCQ |
| ATCC | 128) | KKLEYLRDTARKIEEKRRNQRERGEKELVAPFKYSDKRDDLIA |
| 43767] | | AIYNDAFDVYIDKKKDSLKESSKAKYNTKSDPQQEEGDLKIPIS |
| | | KNGVVFLLSLFLTKQEIHAFKSKIAGFKATVIDEATVSEATVSHG |
| | | KNSICFMATHEIFSHLAYKKLKRKVRTAEINYGEAENAEQLSVY |
| | | AKETLMMQMLDELSKVPDVVYQNLSEDVQKTFIEDWNEYLKE |
| | | NNGDVGTMEEEQVIHPVIRKRYEDKFNYFAIRFLDEFAQFPTLR |
| | | FQVHLGNYLHDSRPKENLISDRRIKEKITVFGRLSELEHKKALFI |
| | | KNTETNEDREHYWEIFPNPNYDFPKENISVNDKDFPIAGSILDRE |
| | | KQPVAGKIGIKVKLLNQQYVSEVDKAVKAHQLKQRKASKPSIQ |
| | | NIIEEIVPINESNPKEAIVFGGQPTAYLSMNDIHSILYEFFDKWEK |
| | | KKEKLEKKGEKELRKEIGKELEKKIVGKIQAQIQQIIDKDTNAKI |
| | | LKPYQDGNSTAIDKEKLIKDLKQEQNILQKLKDEQTVREKEYN |
| | | DFIAYQDKNREINKVRDRNHKQYLKDNLKRKYPEAPARKEVL |
| | | YYREKGKVAVWLANDIKRFMPTDFKNEWKGEQHSLLQKSLAY |
| | | YEQCKEELKNLLPEKVFQHLPFKLGGYFQQKYLYQFYTCYLDK |
| | | RLEYISGLVQQAENFKSENKVFKKVENECFKFLKKQNYTHKEL |
| | | DARVQSILGYPIFLERGFMDEKPTIIKGKTFKGNEALFADWFRY |
| | | YKEYQNFQTFYDTENYPLVELEKKQADRKRKTKIYQQKKNDV |
| | | FTLLMAKHIFKSVFKQDSIDQFSLEDLYQSREERLGNQERARQT |
| | | GERNTNYIWNKTVDLKLCDGKITVENVKLKNVGDFIKYEYDQR |
| | | VQAFLKYEENIEWQAFLIKESKEEENYPYVVEREIEQYEKVRRE |
| | | ELLKEVHLIEEYILEKVKDKEILKKGDNQNFKYYILNGLLKQLK |
| | | NEDVESYKVFNLNTEPEDVNINQLKQEATDLEQKAFVLTYIRN |
| | | KFAHNQLPKKEFWDYCQEKYGKIEKEKTYAEYFAEVFKKEKE |
| | | ALIK |
| HMPREF9 | EKY00 | MMEKENVQGSHIYYEPTDKCFWAAFYNLARHNAYLTIAHINSF |
| 151_01387 | 089 | VNSKKGINNDDKVLDIIDDWSKFDNDLLMGARLNKLILKHFPFL |
| [Prevotella | (SEQ | KAPLYQLAKRKTRKQQGKEQQDYEKKGDEDPEVIQEAIANAFK |
| saccharolytica | ID No. | MANVRKTLHAFLKQLEDLRNHFSHYNYNSPAKKMEVKFDDGF |
| F0055] | 129) | CNKLYYVFDAALQMVKDDNRMNPEINMQTDFEHLVRLGRNR |
| | | KIPNTFKYNFTNSDGTINNNGLLFFVSLFLEKRDAIWMQKKIKG |
| | | FKGGTENYMRMTNEVFCRNRMVIPKLRLETDYDNHQLMFDML |
| | | NELVRCPLSLYKRLKQEDQDKFRVPIEFLDEDNEADNPYQENA |
| | | NSDENPTEETDPLKNTLVRHQHRFPYFVLRYFDLNEVFKQLRFQ |
| | | INLGCYHFSIYDKTIGERTEKRHLTRTLFGFDRLQNFSVKLQPEH |
| | | WKNMVKHLDTEESSDKPYLSDAMPHYQIENEKIGIHFLKTDTE |
| | | KKETVWPSLEVEEVSSNRNKYKSEKNLTADAFLSTHELLPMMF |
| | | YYQLLSSEEKTRAAAGDKVQGVLQSYRKKIFDIYDDFANGTINS |
| | | MQKLDERLAKDNLLRGNMPQQMLAILEHQEPDMEQKAKEKL |
| | | DRLITETKKRIGKLEDQFKQKVRIGKRRADLPKVGSIADWLVND |
| | | MMRFQPAKRNADNTGVPDSKANSTEYRLLQEALAFYSAYKDR |
| | | LEPYFRQVNLIGGTNPHPFLHRVDWKKCNHLLSFYHDYLEAKE |
| | | QYLSHLSPADWQKHQHFLLLKVRKDIQNEKKDWKKSLVAGW |
| | | KNGFNLPRGLFTESIKTWFSTDADKVQITDTKLFENRVGLIAKLI |
| | | PLYYDKVYNDKPQPFYQYPFNINDRYKPEDTRKRFTAASSKLW |
| | | NEKKMLYKNAQPDSSDKIEYPQYLDFLSWKKLERELRMLRNQ |
| | | DMMVWLMCKDLFAQCTVEGVEFADLKLSQLEVDVNVQDNLN |
| | | VLNNVSSMILPLSVYPSDAQGNVLRNSKPLHTVYVQENNTKLL |
| | | KQGNFKSLLKDRRLNGLFSFIAAEGEDLQQHPLTKNRLEYELSI |
| | | YQTMRISVFEQTLQLEKAILTRNKTLCGNNFNNLLNSWSEHRTD |
| | | KKTLQPDIDFLIAVRNAFSHNQYPMSTNTVMQGIEKFNIQTPKL |
| | | EEKDGLGIASQLAKKTKDAASRLQNIINGGTN |
| A343_1752 | EOA10 | MTEQNEKPYNGTYYTLEDKHFWAAFFNLARHNAYITLTHIDRQ |
| [Porphyromonas | 535 | LAYSKADITNDEDILFFKGQWKNLDNDLERKARLRSLILKHFSF |
| gingivalis | (SEQ | LEGAAYGKKLFESQSSGNKSSKKKELTKKEKEELQANALSLDN |
| JCVI | ID No. | LKSILFDFLQKLKDFRNYYSHYRHPESSELPLFDGNMLQRLYNV |
| SC001] | 130) | FDVSVQRVKRDHEHNDKVDPHRHFNHLVRKGKKDRCGNNDN |
| | | PFFKHHFVDREEKVTEAGLLFFVSLFLEKRDAIWMQKKIRGFKG |
| | | GTETYQQMTNEVFCRSRISLPKLKLESLRTDDWMLLDMLNELV |
| | | RCPKSLYDRLREEDRARFRVPVDILSDEDDTDGTEEDPFKNTLV |
| | | RHQDRFPYFALRYFDLKKVFTSLRFHIDLGTYHFAIYKKNIGEQ |
| | | PEDRHLTRNLYGFGRIQDFAEEHRPEEWKRLVRDLDYFETGDK |
| | | PYITQTTPHYHIEKGKIGLRFVPEGQLLWPSPEVGATRTGRSKY |
| | | AQDKRFTAEAFLSVHELMPMMFYYFLLREKYSEEASAERVQGR |
| | | IKRVIEDVYAVYDAFARGEIDTLDRLDACLADKGIRRGHLPRQ |
| | | MIAILSQEHKDMEEKVRKKLQEMIADTDHRLDMLDRQTDRKIR |
| | | IGRKNAGLPKSGVIADWLVRDMMRFQPVAKDTSGKPLNNSKA |
| | | NSTEYRMLQRALALFGGEKERLTPYFRQMNLTGGNNPHPFLHE |
| | | TRWESHTNILSFYRSYLKARKAFLQSIGRSDRVENHRFLLLKEP |
| | | KTDRQTLVAGWKGEFHLPRGIFTEAVRDCLIEMGLDEVGSYKE |
| | | VGFMAKAVPLYFERACKDRVQPFYDYPFNVGNSLKPKKGRFLS |
| | | KEKRAEEWESGKERFRDLEAWSHSAARRIEDAFAGIENASREN |
| | | KKKIEQLLQDLSLWETFESKLKVKADKINIAKLKKEILEAKEHP |
| | | YLDFKSWQKFERELRLVKNQDIITWMMCRDLMEENKVEGLDT |
| | | GTLYLKDIRTDVHEQGSLNVLNRVKPMRLPVVVYRADSRGHV |
| | | HKEQAPLATVYIEERDTKLLKQGNFKSFVKDRRLNGLFSFVDT |
| | | GALAMEQYPISKLRVEYELAKYQTARVCAFEQTLELEESLLTRY |
| | | PHLPDKNFRKMLESWSDPLLDKWPDLHGNVRLLIAVRNAFSHN |
| | | QYPMYDETLFSSIRKYDPSSPDAIEERMGLNIAHRLSEEVKQAK |
| | | EMVERIIQA |
| HMPREF1 | ERI817 | MESIKNSQKSTGKTLQKDPPYFGLYLNMALLNVRKVENHIRKW |
| 981_03090 | 00 | LGDVALLPEKSGFHSLLTTDNLSSAKWTRFYYKSRKFLPFLEMF |
| [Bacteroides | (SEQ | DSDKKSYENRRETTECLDTIDRQKISSLLKEVYGKLQDIRNAFS |
| pyogenes | ID No. | HYHIDDQSVKHTALIISSEMHRFIENAYSFALQKTRARFTGVFVE |
| F0041] | 131) | TDFLQAEEKGDNKKFFAIGGNEGIKLKDNALIFLICLFLDREEAF |
| | | KFLSRATGFKSTKEKGFLAVRETFCALCCRQPHERLLSVNPREA |
| | | LLMDMLNELNRCPDILFEMLDEKDQKSFLPLLGEEEQAHILENS |
| | | LNDELCEAIDDPFEMIASLSKRVRYKNRFPYLMLRYIEEKNLLPF |
| | | IRFRIDLGCLELASYPKKMGEENNYERSVTDHAMAFGRLTDFH |
| | | NEDAVLQQITKGITDEVRFSLYAPRYAIYNNKIGFVRTGGSDKIS |
| | | FPTLKKKGGEGHCVAYTLQNTKSFGFISIYDLRKILLLSFLDKDK |
| | | AKNIVSGLLEQCEKHWKDLSENLFDAIRTELQKEFPVPLIRYTLP |
| | | RSKGGKLVSSKLADKQEKYESEFERRKEKLTEILSEKDFDLSQIP |
| | | RRMIDEWLNVLPTSREKKLKGYVETLKLDCRERLRVFEKREKG |
| | | EHPVPPRIGEMATDLAKDIIRMVIDQGVKQRITSAYYSEIQRCLA |
| | | QYAGDDNRRHLDSIIRELRLKDTKNGHPFLGKVLRPGLGHTEK |
| | | LYQRYFEEKKEWLEATFYPAASPKRVPRFVNPPTGKQKELPLII |
| | | RNLMKERPEWRDWKQRKNSHPIDLPSQLFENEICRLLKDKIGKE |
| | | PSGKLKWNEMFKLYWDKEFPNGMQRFYRCKRRVEVFDKVVE |
| | | YEYSEEGGNYKKYYEALIDEVVRQKISSSKEKSKLQVEDLTLSV |
| | | RRVFKRAINEKEYQLRLLCEDDRLLFMAVRDLYDWKEAQLDL |
| | | DKIDNMLGEPVSVSQVIQLEGGQPDAVIKAECKLKDVSKLMRY |
| | | CYDGRVKGLMPYFANHEATQEQVEMELRHYEDHRRRVFNWV |
| | | FALEKSVLKNEKLRRFYEESQGGCEHRRCIDALRKASLVSEEEY |
| | | EFLVHIRNKSAHNQFPDLEIGKLPPNVTSGFCECIWSKYKAIICRI |
| | | IPFIDPERRFFGKLLEQK |
| HMPREF1 | ERJ656 | MNTVPASENKGQSRTVEDDPQYFGLYLNLARENLIEVESHVRIK |
| 553_02065 | 37 | FGKKKLNEESLKQSLLCDHLLSVDRWTKVYGHSRRYLPFLHYF |
| [Porphyromonas | (SEQ | DPDSQIEKDHDSKTGVDPDSAQRLIRELYSLLDFLRNDFSHNRL |
| gingivalis | ID No. | DGTTFEHLEVSPDISSFITGTYSLACGRAQSRFADFFKPDDFVLA |
| F0568] | 132) | KNRKEQLISVADGKECLTVSGLAFFICLFLDREQASGMLSRIRGF |
| | | KRTDENWARAVHETFCDLCIRHPHDRLESSNTKEALLLDMLNE |
| | | LNRCPRILYDMLPEEERAQFLPALDENSMNNLSENSLNEESRLL |
| | | WDGSSDWAEALTKRIRHQDRFPYLMLRFIEEMDLLKGIRFRVD |
| | | LGEIELDSYSKKVGRNGEYDRTITDHALAFGKLSDFQNEEEVSR |
| | | MISGEASYPVRFSLFAPRYAIYDNKIGYCHTSDPVYPKSKTGEK |
| | | RALSNPRSMGFISVHDLRKLLLMELLCEGSFSRMQSDFLRKANR |
| | | ILDETAEGKLQFSALFPEMRHRFIPPQNPKSKDRREKAETTLEKY |
| | | KQEIKGRKDKLNSQLLSAFDMDQRQLPSRLLDEWMNIRPASHS |
| | | VKLRTYVKQLNEDCRLRLQKFRKDGDGKARAIPLVGEMATFLS |
| | | QDIVRMIISEETKKLITSAYYNEMQRSLAQYAGEENRHQFRAIV |
| | | AELRLLDPSSGHPFLSATMETAHRYTEDFYKCYLEKKREWLAK |
| | | TFYRPEQDENTKRRISVFFVPDGEARKLLPLLIRRRMKEQNDLQ |
| | | DWIRNKQAHPIDLPSHLFDSKIMELLKVKDGKKKWNEAFKDW |
| | | WSTKYPDGMQPFYGLRRELNIHGKSVSYIPSDGKKFADCYTHL |
| | | MEKTVQDKKRELRTAGKPVPPDLAADIKRSFHRAVNEREFMLR |
| | | LVQEDDRLMLMAINKMMTDREEDILPGLKNIDSILDEENQFSLA |
| | | VHAKVLEKEGEGGDNSLSLVPATIEIKSKRKDWSKYIRYRYDR |
| | | RVPGLMSHFPEHKATLDEVKTLLGEYDRCRIKIFDWAFALEGAI |
| | | MSDRDLKPYLHESSSREGKSGEHSTLVKMLVEKKGCLTPDESQ |
| | | YLILIRNKAAHNQFPCAAEMPLIYRDVSAKVGSIEGSSAKDLPE |
| | | GSSLVDSLWKKYEMIIRKILPILDPENRFFGKLLNNMSQPINDL |
| HMPREF1 | ERJ819 | MNTVPASENKGQSRTVEDDPQYFGLYLNLARENLIEVESHVRIK |
| 988_01768 | 87 | FGKKKLNEESLKQSLLCDHLLSVDRWTKVYGHSRRYLPFLHYF |
| [Porphyromonas | (SEQ | DPDSQIEKDHDSKTGVDPDSAQRLIRELYSLLDFLRNDFSHNRL |
| gingivalis | ID No. | DGTTFEHLEVSPDISSFITGTYSLACGRAQSRFADFFKPDDFVLA |
| F0185] | 133) | KNRKEQLISVADGKECLTVSGLAFFICLFLDREQASGMLSRIRGF |
| | | KRTDENWARAVHETFCDLCIRHPHDRLESSNTKEALLLDMLNE |
| | | LNRCPRILYDMLPEEERAQFLPALDENSMNNLSENSLNEESRLL |
| | | WDGSSDWAEALTKRIRHQDRFPYLMLRFIEEMDLLKGIRFRVD |
| | | LGEIELDSYSKKVGRNGEYDRTITDHALAFGKLSDFQNEEEVSR |
| | | MISGEASYPVRFSLFAPRYAIYDNKIGYCHTSDPVYPKSKTGEK |
| | | RALSNPQSMGFISVHDLRKLLLMELLCEGSFSRMQSGFLRKANR |
| | | ILDETAEGKLQFSALFPEMRHRFIPPQNPKSKDRREKAETTLEKY |
| | | KQEIKGRKDKLNSQLLSAFDMNQRQLPSRLLDEWMNIRPASHS |
| | | VKLRTYVKQLNEDCRLRLRKFRKDGDGKARAIPLVGEMATFLS |
| | | QDIVRMIISEETKKLITSAYYNEMQRSLAQYAGEENRRQFRAIV |
| | | AELHLLDPSSGHPFLSATMETAHRYTEDFYKCYLEKKREWLAK |
| | | TFYRPEQDENTKRRISVFFVPDGEARKLLPLLIRRRMKEQNDLQ |
| | | DWIRNKQAHPIDLPSHLFDSKIMELLKVKDGKKKWNEAFKDW |
| | | WSTKYPDGMQPFYGLRRELNIHGKSVSYIPSDGKKFADCYTHL |
| | | MEKTVQDKKRELRTAGKPVPPDLAADIKRSFHRAVNEREFMLR |
| | | LVQEDDRLMLMAINKMMTDREEDILPGLKNIDSILDEENQFSLA |
| | | VHAKVLEKEGEGGDNSLSLVPATIEIKSKRKDWSKYIRYRYDR |
| | | RVPGLMSHFPEHKATLDEVKTLLGEYDRCRIKIFDWAFALEGAI |
| | | MSDRDLKPYLHESSSREGKSGEHSTLVKMLVEKKGCLTPDESQ |
| | | YLILIRNKAAHNQFPCAAEMPLIYRDVSAKVGSIEGSSAKDLPE |
| | | GSSLVDSLWKKYEMIIRKILPILDHENRFFGKLLNNMSQPINDL |
| HMPREF1 | ERJ873 | MNTVPASENKGQSRTVEDDPQYFGLYLNLARENLIEVESHVRIK |
| 990_01800 | 35 | FGKKKLNEESLKQSLLCDHLLSVDRWTKVYGHSRRYLPFLHYF |
| [Porphyromonas | (SEQ | DPDSQIEKDHDSKTGVDPDSAQRLIRELYSLLDFLRNDFSHNRL |
| gingivalis | ID No. | DGTTFEHLEVSPDISSFITGTYSLACGRAQSRFADFFKPDDFVLA |
| W4087] | 134) | KNRKEQLISVADGKECLTVSGLAFFICLFLDREQASGMLSRIRGF |
| | | KRTDENWARAVHETFCDLCIRHPHDRLESSNTKEALLLDMLNE |
| | | LNRCPRILYDMLPEEERAQFLPALDENSMNNLSENSLNEESRLL |
| | | WDGSSDWAEALTKRIRHQDRFPYLMLRFIEEMDLLKGIRFRVD |
| | | LGEIELDSYSKKVGRNGEYDRTITDHALAFGKLSDFQNEEEVSR |
| | | MISGEASYPVRFSLFAPRYAIYDNKIGYCHTSDPVYPKSKTGEK |
| | | RALSNPRSMGFISVHDLRKLLLMELLCEGSFSRMQSDFLRKANR |
| | | ILDETAEGKLQFSALFPEMRHRFIPPQNPKSKDRREKAETTLEKY |
| | | KQEIKGRKDKLNSQLLSAFDMDQRQLPSRLLDEWMNIRPASHS |
| | | VKLRTYVKQLNEDCRLRLQKFRKDGDGKARAIPLVGEMATFLS |
| | | QDIVRMIISEETKKLITSAYYNEMQRSLAQYAGEENRHQFRAIV |
| | | AELRLLDPSSGHPFLSATMETAHRYTEDFYKCYLEKKREWLAK |
| | | TFYRPEQDENTKRRISVFFVPDGEARKLLPLLIRRRMKEQNDLQ |
| | | DWIRNKQAHPIDLPSHLFDSKVMELLKVKDGKKKWNEAFKDW |
| | | WSTKYPDGMQPFYGLRRELNIHGKSVSYIPSDGKKFADCYTHL |
| | | MEKTVRDKKRELRTAGKPVPPDLAAYIKRSFHRAVNEREFMLR |
| | | LVQEDDRLMLMAINKIMTDREEDILPGLKNIDSILDKENQFSLA |
| | | VHAKVLEKEGEGGDNSLSLVPATIEIKSKRKDWSKYIRYRYDR |
| | | RVPGLMSHFPEHKATLDEVKTLLGEYDRCRIKIFDWAFALEGAI |
| | | MSDRDLKPYLHESSSREGKSGEHSTLVKMLVEKKGCLTPDESQ |
| | | YLILIRNKAAHNQFPCAAEIPLIYRDVSAKVGSIEGSSAKDLPEG |
| | | SSLVDSLWKKYEMIIRKILPILDPENRFFGKLLNNMSQPINDL |
| M573_117 | KJJ867 | MKMEDDKKTTESTNMLDNKHFWAAFLNLARHNVYITVNHINK |
| 042 | 56 | VLELKNKKDQDIIIDNDQDILAIKTHWEKVNGDLNKTERLRELM |
| [Prevotella | (SEQ | TKHFPFLETAIYTKNKEDKEEVKQEKQAEAQSLESLKDCLFLFL |
| intermedia | ID No. | EKLQEARNYYSHYKYSESTKEPMLEEGLLEKMYNIFDDNIQLVI |
| ZT] | 135) | KDYQHNKDINPDEDFKHLDRKGQFKYSFADNEGNITESGLLFF |
| | | VSLFLEKKDAIWMQQKLTGFKDNRESKKKMTHEVFCRRRMLL |
| | | PKLRLESTQTQDWILLDMLNELIRCPKSLYERLQGEYRKKFNVP |
| | | FDSADEDYDAEQEPFKNTLVRHQDRFPYFALRYFDYNEIFTNLR |
| | | FQIDLGTYHFSIYKKLIGGQKEDRHLTHKLYGFERIQEFAKQNRP |
| | | DEWKALVKDLDTYETSNERYISETTPHYHLENQKIGIRFRNGNK |
| | | EIWPSLKTNGENNEKSKYKLDKPYQAEAFLSVHELLPMMFYYL |
| | | LLKKEEPNNDKKNASIVEGFIKREIRDMYKLYDAFANGEINNIG |
| | | DLEKYCEDKGIPKRHLPKQMVAILYDEPKDMVKEAKRKQKEM |
| | | VKDTKKLLATLEKQTQEEIEDGGRNIRLLKSGEIARWLVNDMM |
| | | RFQPVQKDNEGNPLNNSKANSTEYQMLQRSLALYNKEEKPTRY |
| | | FRQVNLINSSNPHPFLKWTKWEECNNILSFYRNYLTKKIEFLNK |
| | | LKPEDWEKNQYFLKLKEPKTNRETLVQGWKNGFNLPRGIFTEPI |
| | | REWFKRHQNDSKEYEKVEALKRVGLVTKVIPLFFKEEYFKEDA |
| | | QKEINNCVQPFYSFPYNVGNIHKPDEKDFLPSEERKKLWGDKK |
| | | DKFKGYKAKVKSKKLTDKEKEEYRSYLEFQSWNKFERELRLV |
| | | RNQDIVTWLLCTELIDKMKVEGLNVEELQKLRLKDIDTDTAKQ |
| | | EKNNILNRIMPMQLPVTVYEIDDSHNIVKDRPLHTVYIEETKTKL |
| | | LKQGNFKALVKDRRLNGLFSFVDTSSKAELKDKPISKSVVEYEL |
| | | GEYQNARIETIKDMLLLEKTLIKKYEKLPTDNFSDMLNGWLEG |
| | | KDESDKARFQNDVKLLVAVRNAFSHNQYPMRNRIAFANINPFS |
| | | LSSADISEEKKLDIANQLKDKTHKIIKKIIEIEKPIETKE |
| A2033_102 | OFX18 | MENQTQKGKGIYYYYTKNEDKHYFGSFLNLANNNIEQIIEEFRI |
| 05 | 020.1 | RLSLKDEKNIKEIINNYFTDKKSYTDWERGINILKEYLPVIDYLD |
| [Bacteroidetes | (SEQ | LAITDKEFEKIDLKQKETAKRKYFRTNFSLLIDTIIDLRNFYTHYF |
| bacterium | ID No. | HKPISINPDVAKFLDKNLLNVCLDIKKQKMKTDKTKQALKDGL |
| GWA2_31_ | 136) | DKELKKLIELKKAELKEKKIKTWNITENVEGAVYNDAFNHMVY |
| 9] | | KNNAGVTILKDYHKSILPDDKIDSELKLNFSISGLVFLLSMFLSK |
| | | KEIEQFKSNLEGFKGKVIGENGEYEISKFNNSLKYMATHWIFSY |
| | | LTFKGLKQRVKNTFDKETLLMQMIDELNKVPHEVYQTLSKEQQ |
| | | NEFLEDINEYVQDNEENKKSMENSIVVHPVIRKRYDDKFNYFAI |
| | | RFLDEFANFPTLKFFVTAGNFVHDKREKQIQGSMLTSDRMIKEK |
| | | INVFGKLTEIAKYKSDYFSNENTLETSEWELFPNPSYLLIQNNIPV |
| | | HIDLIHNTEEAKQCQIAIDRIKCTTNPAKKRNTRKSKEEIIKIIYQ |
| | | KNKNIKYGDPTALLSSNELPALIYELLVNKKSGKELENIIVEKIV |
| | | NQYKTIAGFEKGQNLSNSLITKKLKKSEPNEDKINAEKIILAINRE |
| | | LEITENKLNIIKNNRAEFRTGAKRKHIFYSKELGQEATWIAYDLK |
| | | RFMPEASRKEWKGFHHSELQKFLAFYDRNKNDAKALLNMFW |
| | | NFDNDQLIGNDLNSAFREFHFDKFYEKYLIKRDEILEGFKSFISN |
| | | FKDEPKLLKKGIKDIYRVFDKRYYIIKSTNAQKEQLLSKPICLPR |
| | | GIFDNKPTYIEGVKVESNSALFADWYQYTYSDKHEFQSFYDMP |
| | | RDYKEQFEKFELNNIKSIQNKKNLNKSDKFIYFRYKQDLKIKQIK |
| | | SQDLFIKLMVDELFNVVFKNNIELNLKKLYQTSDERFKNQLIAD |
| | | VQKNREKGDTSDNKMNENFIWNMTIPLSLCNGQIEEPKVKLKD |
| | | IGKFRKLETDDKVIQLLEYDKSKVWKKLEIEDELENMPNSYERI |
| | | RREKLLKGIQEFEHFLLEKEKFDGINHPKHFEQDLNPNFKTYVIN |
| | | GVLRKNSKLNYTEIDKLLDLEHISIKDIETSAKEIHLAYFLIHVRN |
| | | KFGHNQLPKLEAFELMKKYYKKNNEETYAEYFHKVSSQIVNEF |
| | | KNSLEKHS |
| SAMN054 | SDI272 | MEKTQTGLGIYYDHTKLQDKYFFGGFFNLAQNNIDNVIKAFIIK |
| 21542_066 | 89.1 | FFPERKDKDINIAQFLDICFKDNDADSDFQKKNKFLRIHFPVIGF |
| 6 | (SEQ | LTSDNDKAGFKKKFALLLKTISELRNFYTHYYHKSIEFPSELFEL |
| [Chryseobacterium | ID No. | LDDIFVKTTSEIKKLKKKDDKTQQLLNKNLSEEYDIRYQQQIER |
| jejuense] | 137) | LKELKAQGKRVSLTDETAIRNGVFNAAFNHLIYRDGENVKPSR |
| | | LYQSSYSEPDPAENGISLSQNSILFLLSMFLERKETEDLKSRVKG |
| | | FKAKIIKQGEEQISGLKFMATHWVFSYLCFKGIKQKLSTEFHEET |
| | | LLIQIIDELSKVPDEVYSAFDSKTKEKFLEDINEYMKEGNADLSL |
| | | EDSKVIHPVIRKRYENKFNYFAIRFLDEYLSSTSLKFQVHVGNY |
| | | VHDRRVKHINGTGFQTERIVKDRIKVFGRLSNISNLKADYIKEQ |
| | | LELPNDSNGWEIFPNPSYIFIDNNVPIHVLADEATKKGIELFKDK |
| | | RRKEQPEELQKRKGKISKYNIVSMIYKEAKGKDKLRIDEPLALL |
| | | SLNEIPALLYQILEKGATPKDIELIIKNKLTERFEKIKNYDPETPAP |
| | | ASQISKRLRNNTTAKGQEALNAEKLSLLIEREIENTETKLSSIEEK |
| | | RLKAKKEQRRNTPQRSIFSNSDLGRIAAWLADDIKRFMPAEQRK |
| | | NWKGYQHSQLQQSLAYFEKRPQEAFLLLKEGWDTSDGSSYWN |
| | | NWVMNSFLENNHFEKFYKNYLMKRVKYFSELAGNIKQHTHNT |
| | | KFLRKFIKQQMPADLFPKRHYILKDLETEKNKVLSKPLVFSRGL |
| | | FDNNPTFIKGVKVTENPELFAEWYSYGYKTEHVFQHFYGWERD |
| | | YNELLDSELQKGNSFAKNSIYYNRESQLDLIKLKQDLKIKKIKIQ |
| | | DLFLKRIAEKLFENVFNYPTTLSLDEFYLTQEERAEKERIALAQS |
| | | LREEGDNSPNIIKDDFIWSKTIAFRSKQIYEPAIKLKDIGKFNRFV |
| | | LDDEESKASKLLSYDKNKIWNKEQLERELSIGENSYEVIRREKL |
| | | FKEIQNLELQILSNWSWDGINHPREFEMEDQKNTRHPNFKMYL |
| | | VNGILRKNINLYKEDEDFWLESLKENDFKTLPSEVLETKSEMVQ |
| | | LLFLVILIRNQFAHNQLPEIQFYNFIRKNYPEIQNNTVAELYLNLI |
| | | KLAVQKLKDNS |
| SAMN054 | SHM52 | MNTRVTGMGVSYDHTKKEDKHFFGGFLNLAQDNITAVIKAFCI |
| 44360_113 | 812.1 | KFDKNPMSSVQFAESCFTDKDSDTDFQNKVRYVRTHLPVIGYL |
| 66 | (SEQ ID | NYGGDRNTFRQKLSTLLKAVDSLRNFYTHYYHSPLALSTELFEL |
| [Chryseobacterium | No. | LDTVFASVAVEVKQHKMKDDKTRQLLSKSLAEELDIRYKQQLE |
| carnipullorum] | 138) | RLKELKEQGKNIDLRDEAGIRNGVLNAAFNHLIYKEGEIAKPTL |
| | | SYSSFYYGADSAENGITISQSGLLFLLSMFLGKKEIEDLKSRIRGF |
| | | KAKIVRDGEENISGLKFMATHWIFSYLSFKGMKQRLSTDFHEET |
| | | LLIQIIDELSKVPDEVYHDFDTATREKFVEDINEYIREGNEDFSLG |
| | | DSTIIHPVIRKRYENKFNYFAVRFLDEFIKFPSLRFQVHLGNFVH |
| | | DRRIKDIHGTGFQTERVVKDRIKVFGKLSEISSLKTEYIEKELDL |
| | | DSDTGWEIFPNPSYVFIDNNIPIYISTNKTFKNGSSEFIKLRRKEKP |
| | | EEMKMRGEDKKEKRDIASMIGNAGSLNSKTPLAMLSLNEMPAL |
| | | LYEILVKKTTPEEIELIIKEKLDSHFENIKNYDPEKPLPASQISKRL |
| | | RNNTTDKGKKVINPEKLIHLINKEIDATEAKFALLAKNRKELKE |
| | | KFRGKPLRQTIFSNMELGREATWLADDIKRFMPDILRKNWKGY |
| | | QHNQLQQSLAFFNSRPKEAFTILQDGWDFADGSSFWNGWIINSF |
| | | VKNRSFEYFYEAYFEGRKEYFSSLAENIKQHTSNHRNLRRFIDQ |
| | | QMPKGLFENRHYLLENLETEKNKILSKPLVFPRGLFDTKPTFIKG |
| | | IKVDEQPELFAEWYQYGYSTEHVFQNFYGWERDYNDLLESELE |
| | | KDNDFSKNSIHYSRTSQLELIKLKQDLKIKKIKIQDLFLKLIAGHI |
| | | FENIFKYPASFSLDELYLTQEERLNKEQEALIQSQRKEGDHSDNII |
| | | KDNFIGSKTVTYESKQISEPNVKLKDIGKFNRFLLDDKVKTLLS |
| | | YNEDKVWNKNDLDLELSIGENSYEVIRREKLFKKIQNFELQTLT |
| | | DWPWNGTDHPEEFGTTDNKGVNHPNFKMYVVNGILRKHTDW |
| | | FKEGEDNWLENLNETHFKNLSFQELETKSKSIQTAFLIIMIRNQF |
| | | AHNQLPAVQFFEFIQKKYPEIQGSTTSELYLNFINLAVVELLELL |
| | | EK |
| SAMN054 | SIS704 | METQILGNGISYDHTKTEDKHFFGGFLNTAQNNIDLLIKAYISKF |
| 21786_101 | 81.1 | ESSPRKLNSVQFPDVCFKKNDSDADFQHKLQFIRKHLPVIQYLK |
| 1119 | (SEQ ID | YGGNREVLKEKFRLLLQAVDSLRNFYTHFYHKPIQLPNELLTLL |
| [Chryseobacterium | No. | DTIFGEIGNEVRQNKMKDDKTRHLLKKNLSEELDFRYQEQLER |
| ureilyticum] | 139) | LRKLKSEGKKVDLRDTEAIRNGVLNAAFNHLIFKDAEDFKPTVS |
| | | YSSYYYDSDTAENGISISQSGLLFLLSMFLGRREMEDLKSRVRG |
| | | FKARIIKHEEQHVSGLKFMATHWVFSEFCFKGIKTRLNADYHEE |
| | | TLLIQLIDELSKVPDELYRSFDVATRERFIEDINEYIRDGKEDKSL |
| | | IESKIVHPVIRKRYESKFNYFAIRFLDEFVNFPTLRFQVHAGNYV |
| | | HDRRIKSIEGTGFKTERLVKDRIKVFGKLSTISSLKAEYLAKAVN |
| | | ITDDTGWELLPHPSYVFIDNNIPIHLTVDPSFKNGVKEYQEKRKL |
| | | QKPEEMKNRQGGDKMHKPAISSKIGKSKDINPESPVALLSMNEI |
| | | PALLYEILVKKASPEEVEAKIRQKLTAVFERIRDYDPKVPLPASQ |
| | | VSKRLRNNTDTLSYNKEKLVELANKEVEQTERKLALITKNRRE |
| | | CREKVKGKFKRQKVFKNAELGTEATWLANDIKRFMPEEQKKN |
| | | WKGYQHSQLQQSLAFFESRPGEARSLLQAGWDFSDGSSFWNG |
| | | WVMNSFARDNTFDGFYESYLNGRMKYFLRLADNIAQQSSTNK |
| | | LISNFIKQQMPKGLFDRRLYMLEDLATEKNKILSKPLIFPRGIFD |
| | | DKPTFKKGVQVSEEPEAFADWYSYGYDVKHKFQEFYAWDRD |
| | | YEELLREELEKDTAFTKNSIHYSRESQIELLAKKQDLKVKKVRI |
| | | QDLYLKLMAEFLFENVFGHELALPLDQFYLTQEERLKQEQEAIV |
| | | QSQRPKGDDSPNIVKENFIWSKTIPFKSGRVFEPNVKLKDIGKFR |
| | | NLLTDEKVDILLSYNNTEIGKQVIENELIIGAGSYEFIRREQLFKEI |
| | | QQMKRLSLRSVRGMGVPIRLNLK |
| Prevotella | WP_00 | MQKQDKLFVDRKKNAIFAFPKYITIMENQEKPEPIYYELTDKHF |
| buccae | 434358 | WAAFLNLARHNVYTTINHINRRLEIAELKDDGYMMDIKGSWNE |
| | 1(SEQ | QAKKLDKKVRLRDLIMKHFPFLEAAAYEITNSKSPNNKEQREK |
| | ID No. | EQSEALSLNNLKNVLFIFLEKLQVLRNYYSHYKYSEESPKPIFET |
| | 140) | SLLKNMYKVFDANVRLVKRDYMHHENIDMQRDFTHLNRKKQ |
| | | VGRTKNIIDSPNFHYHFADKEGNMTIAGLLFFVSLFLDKKDAIW |
| | | MQKKLKGFKDGRNLREQMTNEVFCRSRISLPKLKLENVQTKD |
| | | WMQLDMLNELVRCPKSLYERLREKDRESFKVPFDIFSDDYDAE |
| | | EEPFKNTLVRHQDRFPYFVLRYFDLNEIFEQLRFQIDLGTYHFSI |
| | | YNKRIGDEDEVRHLTHHLYGFARIQDFAQQNQPEVWRKLVKD |
| | | LDYFEASQEPYIPKTAPHYHLENEKIGIKFCSTHNNLFPSLKTEK |
| | | TCNGRSKFNLGTQFTAEAFLSVHELLPMMFYYLLLTKDYSRKE |
| | | SADKVEGIIRKEISNIYAIYDAFANGEINSIADLTCRLQKTNILQG |
| | | HLPKQMISILEGRQKDMEKEAERKIGEMIDDTQRRLDLLCKQTN |
| | | QKIRIGKRNAGLLKSGKIADWLVNDMMRFQPVQKDQNNIPINN |
| | | SKANSTEYRMLQRALALFGSENFRLKAYFNQMNLVGNDNPHP |
| | | FLAETQWEHQTNILSFYRNYLEARKKYLKGLKPQNWKQYQHF |
| | | LILKVQKTNRNTLVTGWKNSFNLPRGIFTQPIREWFEKHNNSKR |
| | | IYDQILSFDRVGFVAKAIPLYFAEEYKDNVQPFYDYPFNIGNKL |
| | | KPQKGQFLDKKERVELWQKNKELFKNYPSEKKKTDLAYLDFL |
| | | SWKKFERELRLIKNQDIVTWLMFKELFNMATVEGLKIGEIHLRD |
| | | IDTNTANEESNNILNRIMPMKLPVKTYETDNKGNILKERPLATF |
| | | YIEETETKVLKQGNFKVLAKDRRLNGLLSFAETTDIDLEKNPITK |
| | | LSVDHELIKYQTTRISIFEMTLGLEKKLINKYPTLPTDSFRNMLE |
| | | RWLQCKANRPELKNYVNSLIAVRNAFSHNQYPMYDATLFAEV |
| | | KKFTLFPSVDTKKIELNIAPQLLEIVGKAIKEIEKSENKN |
| Porphyromonas | WP_00 | MNTVPASENKGQSRTVEDDPQYFGLYLNLARENLIEVESHVRIK |
| gingivalis | 587351 | FGKKKLNEESLKQSLLCDHLLSVDRWTKVYGHSRRYLPFLHYF |
| | 1 | DPDSQIEKDHDSKTGVDPDSAQRLIRELYSLLDFLRNDFSHNRL |
| | (SEQ | DGTTFEHLEVSPDISSFITGTYSLACGRAQSRFADFFKPDDFVLA |
| | ID No. | KNRKEQLISVADGKECLTVSGLAFFICLFLDREQASGMLSRIRGF |
| | 141) | KRTDENWARAVHETFCDLCIRHPHDRLESSNTKEALLLDMLNE |
| | | LNRCPRILYDMLPEEERAQFLPALDENSMNNLSENSLNEESRLL |
| | | WDGSSDWAEALTKRIRHQDRFPYLMLRFIEEMDLLKGIRFRVD |
| | | LGEIELDSYSKKVGRNGEYDRTITDHALAFGKLSDFQNEEEVSR |
| | | MISGEASYPVRFSLFAPRYAIYDNKIGYCHTSDPVYPKSKTGEK |
| | | RALSNPQSMGFISVHNLRKLLLMELLCEGSFSRMQSDFLRKANR |
| | | ILDETAEGKLQFSALFPEMRHRFIPPQNPKSKDRREKAETTLEKY |
| | | KQEIKGRKDKLNSQLLSAFDMNQRQLPSRLLDEWMNIRPASHS |
| | | VKLRTYVKQLNEDCRLRLRKFRKDGDGKARAIPLVGEMATFLS |
| | | QDIVRMIISEETKKLITSAYYNEMQRSLAQYAGEENRRQFRAIV |
| | | AELHLLDPSSGHPFLSATMETAHRYTEDFYKCYLEKKREWLAK |
| | | TFYRPEQDENTKRRISVFFVPDGEARKLLPLLIRRRMKEQNDLQ |
| | | DWIRNKQAHPIDLPSHLFDSKIMELLKVKDGKKKWNEAFKDW |
| | | WSTKYPDGMQPFYGLRRELNIHGKSVSYIPSDGKKFADCYTHL |
| | | MEKTVQDKKRELRTAGKPVPPDLAADIKRSFHRAVNEREFMLR |
| | | LVQEDDRLMLMAINKMMTDREEDILPGLKNIDSILDEENQFSLA |
| | | VHAKVLEKEGEGGDNSLSLVPATIEIKSKRKDWSKYIRYRYDR |
| | | RVPGLMSHFPEHKATLDEVKTLLGEYDRCRIKIFDWAFALEGAI |
| | | MSDRDLKPYLHESSSREGKSGEHSTLVKMLVEKKGCLTPDESQ |
| | | YLILIRNKAAHNQFPCAAEMPLIYRDVSAKVGSIEGSSAKDLPE |
| | | GSSLVDSLWKKYEMIIRKILPILDPENRFFGKLLNNMSQPINDL |
| Porphyromonas | WP_00 | MTEQNEKPYNGTYYTLEDKHFWAAFFNLARHNAYITLAHIDRQ |
| gingivalis | 587419 | LAYSKADITNDEDILFFKGQWKNLDNDLERKARLRSLILKHFSF |
| | 5 | LEGAAYGKKLFESQSSGNKSSKKKELTKKEKEELQANALSLDN |
| | (SEQ | LKSILFDFLQKLKDFRNYYSHYRHPESSELPLFDGNMLQRLYNV |
| | ID No. | FDVSVQRVKRDHEHNDKVDPHRHFNHLVRKGKKDKYGNNDN |
| | 142) | PFFKHHFVDREEKVTEAGLLFFVSLFLEKRDAIWMQKKIRGFKG |
| | | GTEAYQQMTNEVFCRSRISLPKLKLESLRTDDWMLLDMLNELV |
| | | RCPKSLYDRLREEDRARFRVPVDILSDEDDTDGTEEDPFKNTLV |
| | | RHQDRFPYFALRYFDLKKVFTSLRFHIDLGTYHFAIYKKNIGEQ |
| | | PEDRHLTRNLYGFGRIQDFAEEHRPEEWKRLVRDLDYFETGDK |
| | | PYITQTTPHYHIEKGKIGLRFVPEGQLLWPSPEVGATRTGRSKY |
| | | AQDKRFTAEAFLSVHELMPMMFYYFLLREKYSEEASAEKVQG |
| | | RIKRVIEDVYAVYDAFARDEINTRDELDACLADKGIRRGHLPRQ |
| | | MIAILSQEHKDMEEKVRKKLQEMIADTDHRLDMLDRQTDRKIR |
| | | IGRKNAGLPKSGVIADWLVRDMMRFQPVAKDTSGKPLNNSKA |
| | | NSTEYRMLQRALALFGGEKERLTPYFRQMNLTGGNNPHPFLHE |
| | | TRWESHTNILSFYRSYLKARKAFLQSIGRSDREENHRFLLLKEPK |
| | | TDRQTLVAGWKSEFHLPRGIFTEAVRDCLIEMGYDEVGSYKEV |
| | | GFMAKAVPLYFERACKDRVQPFYDYPFNVGNSLKPKKGRFLSK |
| | | EKRAEEWESGKERFRDLEAWSHSAARRIEDAFVGIEYASWENK |
| | | KKIEQLLQDLSLWETFESKLKVKADKINIAKLKKEILEAKEHPY |
| | | HDFKSWQKFERELRLVKNQDIITWMMCRDLMEENKVEGLDTG |
| | | TLYLKDIRTDVQEQGSLNVLNHVKPMRLPVVVYRADSRGHVH |
| | | KEEAPLATVYIEERDTKLLKQGNFKSFVKDRRLNGLFSFVDTGA |
| | | LAMEQYPISKLRVEYELAKYQTARVCAFEQTLELEESLLTRYPH |
| | | LPDESFREMLESWSDPLLDKWPDLQREVRLLIAVRNAFSHNQY |
| | | PMYDETIFSSIRKYDPSSLDAIEERMGLNIAHRLSEEVKLAKEMV |
| | | ERIIQA |
| Prevotella | WP_00 | MKEEEKGKTPVVSTYNKDDKHFWAAFLNLARHNVYITVNHIN |
| pallens | 604483 | KILGEGEINRDGYENTLEKSWNEIKDINKKDRLSKLIIKHFPFLE |
| | 3 | VTTYQRNSADTTKQKEEKQAEAQSLESLKKSFFVFIYKLRDLRN |
| | (SEQ | HYSHYKHSKSLERPKFEEDLQEKMYNIFDASIQLVKEDYKHNT |
| | ID No. | DIKTEEDFKHLDRKGQFKYSFADNEGNITESGLLFFVSLFLEKK |
| | 143) | DAIWVQKKLEGFKCSNESYQKMTNEVFCRSRMLLPKLRLQSTQ |
| | | TQDWILLDMLNELIRCPKSLYERLREEDRKKFRVPIEIADEDYD |
| | | AEQEPFKNALVRHQDRFPYFALRYFDYNEIFTNLRFQIDLGTYH |
| | | FSIYKKQIGDYKESHHLTHKLYGFERIQEFTKQNRPDEWRKFVK |
| | | TFNSFETSKEPYIPETTPHYHLENQKIGIRFRNDNDKIWPSLKTNS |
| | | EKNEKSKYKLDKSFQAEAFLSVHELLPMMFYYLLLKTENTDND |
| | | NEIETKKKENKNDKQEKHKIEEIIENKITEIYALYDAFANGKINSI |
| | | DKLEEYCKGKDIEIGHLPKQMIAILKSEHKDMATEAKRKQEEM |
| | | LADVQKSLESLDNQINEEIENVERKNSSLKSGEIASWLVNDMM |
| | | RFQPVQKDNEGNPLNNSKANSTEYQMLQRSLALYNKEEKPTRY |
| | | FRQVNLIESSNPHPFLNNTEWEKCNNILSFYRSYLEAKKNFLESL |
| | | KPEDWEKNQYFLMLKEPKTNCETLVQGWKNGFNLPRGIFTEPI |
| | | RKWFMEHRKNITVAELKRVGLVAKVIPLFFSEEYKDSVQPFYN |
| | | YLFNVGNINKPDEKNFLNCEERRELLRKKKDEFKKMTDKEKEE |
| | | NPSYLEFQSWNKFERELRLVRNQDIVTWLLCMELFNKKKIKEL |
| | | NVEKIYLKNINTNTTKKEKNTEEKNGEEKIIKEKNNILNRIMPMR |
| | | LPIKVYGRENFSKNKKKKIRRNTFFTVYIEEKGTKLLKQGNFKA |
| | | LERDRRLGGLFSFVKTHSKAESKSNTISKSRVEYELGEYQKARIE |
| | | IIKDMLALEETLIDKYNSLDTDNFHNMLTGWLKLKDEPDKASF |
| | | QNDVDLLIAVRNAFSHNQYPMRNRIAFANINPFSLSSANTSEEK |
| | | GLGIANQLKDKTHKTIEKIIEIEKPIETKE |
| Myroides | WP_00 | MKDILTTDTTEKQNRFYSHKIADKYFFGGYFNLASNNIYEVFEE |
| odoratimimus | 626141 | VNKRNTFGKLAKRDNGNLKNYIIHVFKDELSISDFEKRVAIFAS |
| | 4 | YFPILETVDKKSIKERNRTIDLTLSQRIRQFREMLISLVTAVDQLR |
| | (SEQ | NFYTHYHHSEIVIENKVLDFLNSSLVSTALHVKDKYLKTDKTKE |
| | ID No. | FLKETIAAELDILIEAYKKKQIEKKNTRFKANKREDILNAIYNEA |
| | 144) | FWSFINDKDKDKETVVAKGADAYFEKNHHKSNDPDFALNISEK |
| | | GIVYLLSFFLTNKEMDSLKANLTGFKGKVDRESGNSIKYMATQ |
| | | RIYSFHTYRGLKQKIRTSEEGVKETLLMQMIDELSKVPNVVYQH |
| | | LSTTQQNSFIEDWNEYYKDYEDDVETDDLSRVIHPVIRKRYEDR |
| | | FNYFAIRFLDEFFDFPTLRFQVHLGDYVHDRRTKQLGKVESDRII |
| | | KEKVTVFARLKDINSAKANYFHSLEEQDKEELDNKWTLFPNPS |
| | | YDFPKEHTLQHQGEQKNAGKIGIYVKLRDTQYKEKAALEEARK |
| | | SLNPKERSATKASKYDIITQIIEANDNVKSEKPLVFTGQPIAYLS |
| | | MNDIHSMLFSLLTDNAELKKTPEEVEAKLIDQIGKQINEILSKDT |
| | | DTKILKKYKDNDLKETDTDKITRDLARDKEEIEKLILEQKQRAD |
| | | DYNYTSSTKFNIDKSRKRKHLLFNAEKGKIGVWLANDIKRFMT |
| | | EEFKSKWKGYQHTELQKLFAYYDTSKSDLDLILSDMVMVKDY |
| | | PIELIALVKKSRTLVDFLNKYLEARLGYMENVITRVKNSIGTPQF |
| | | KTVRKECFTFLKKSNYTVVSLDKQVERILSMPLFIERGFMDDKP |
| | | TMLEGKSYQQHKEKFADWFVHYKENSNYQNFYDTEVYEITTE |
| | | DKREKAKVTKKIKQQQKNDVFTLMMVNYMLEEVLKLSSNDRL |
| | | SLNELYQTKEERIVNKQVAKDTQERNKNYIWNKVVDLQLCEG |
| | | LVRIDKVKLKDIGNFRKYENDSRVKEFLTYQSDIVWSAYLSNEV |
| | | DSNKLYVIERQLDNYESIRSKELLKEVQEIECSVYNQVANKESL |
| | | KQSGNENFKQYVLQGLVPIGMDVREMLILSTDVKFIKEEIIQLG |
| | | QAGEVEQDLYSLIYIRNKFAHNQLPIKEFFDFCENNYRSISDNEY |
| | | YAEYYMEIFRSIKEKYTS |
| Myroides | WP_00 | MKDILTTDTTEKQNRFYSHKIADKYFFGGYFNLASNNIYEVFEE |
| odoratimimus | 626550 | VNKRNTFGKLAKRDNGNLKNYIIHVFKDELSISDFEKRVAIFAS |
| | 9 | YFPILETVDKKSIKERNRTIDLTLSQRIRQFREMLISLVTAVDQLR |
| | (SEQ | NFYTHYHHSEIVIENKVLDFLNSSLVSTALHVKDKYLKTDKTKE |
| | ID No. | FLKETIAAELDILIEAYKKKQIEKKNTRFKANKREDILNAIYNEA |
| | 145) | FWSFINDKDKDKETVVAKGADAYFEKNHHKSNDPDFALNISEK |
| | | GIVYLLSFFLTNKEMDSLKANLTGFKGKVDRESGNSIKYMATQ |
| | | RIYSFHTYRGLKQKIRTSEEGVKETLLMQMIDELSKVPNVVYQH |
| | | LSTTQQNSFIEDWNEYYKDYEDDVETDDLSRVIHPVIRKRYEDR |
| | | FNYFAIRFLDEFFDFPTLRFQVHLGDYVHDRRTKQLGKVESDRII |
| | | KEKVTVFARLKDINSAKASYFHSLEEQDKEELDNKWTLFPNPS |
| | | YDFPKEHTLQHQGEQKNAGKIGIYVKLRDTQYKEKAALEEARK |
| | | SLNPKERSATKASKYDIITQIIEANDNVKSEKPLVFTGQPIAYLS |
| | | MNDIHSMLFSLLTDNAELKKTPEEVEAKLIDQIGKQINEILSKDT |
| | | DTKILKKYKDNDLKETDTDKITRDLARDKEEIEKLILEQKQRAD |
| | | DYNYTSSTKFNIDKSRKRKHLLFNAEKGKIGVWLANDIKRFMF |
| | | KESKSKWKGYQHTELQKLFAYFDTSKSDLELILSDMVMVKDYP |
| | | IELIDLVRKSRTLVDFLNKYLEARLGYIENVITRVKNSIGTPQFKT |
| | | VRKECFAFLKESNYTVASLDKQIERILSMPLFIERGFMDSKPTML |
| | | EGKSYQQHKEDFADWFVHYKENSNYQNFYDTEVYEIITEDKRE |
| | | QAKVTKKIKQQQKNDVFTLMMVNYMLEEVLKLPSNDRLSLNE |
| | | LYQTKEERIVNKQVAKDTQERNKNYIWNKVVDLQLCEGLVRID |
| | | KVKLKDIGNFRKYENDSRVKEFLTYQSDIVWSGYLSNEVDSNK |
| | | LYVIERQLDNYESIRSKELLKEVQEIECIVYNQVANKESLKQSGN |
| | | ENFKQYVLQGLLPRGTDVREMLILSTDVKFKKEEIMQLGQVRE |
| | | VEQDLYSLIYIRNKFAHNQLPIKEFFDFCENNYRPISDNEYYAEY |
| | | YMEIFRSIKEKYAS |
| Prevotella | WP_00 | MQKQDKLFVDRKKNAIFAFPKYITIMENQEKPEPIYYELTDKHF |
| sp. MSX73 | 741216 | WAAFLNLARHNVYTTINHINRRLEIAELKDDGYMMGIKGSWNE |
| | 3 | QAKKLDKKVRLRDLIMKHFPFLEAAAYEITNSKSPNNKEQREK |
| | (SEQ | EQSEALSLNNLKNVLFIFLEKLQVLRNYYSHYKYSEESPKPIFET |
| | ID No. | SLLKNMYKVFDANVRLVKRDYMHHENIDMQRDFTHLNRKKQ |
| | 146) | VGRTKNIIDSPNFHYHFADKEGNMTIAGLLFFVSLFLDKKDAIW |
| | | MQKKLKGFKDGRNLREQMTNEVFCRSRISLPKLKLENVQTKD |
| | | WMQLDMLNELVRCPKSLYERLREKDRESFKVPFDIFSDDYDAE |
| | | EEPFKNTLVRHQDRFPYFVLRYFDLNEIFEQLRFQIDLGTYHFSI |
| | | YNKRIGDEDEVRHLTHHLYGFARIQDFAPQNQPEEWRKLVKDL |
| | | DHFETSQEPYISKTAPHYHLENEKIGIKFCSTHNNLFPSLKREKT |
| | | CNGRSKFNLGTQFTAEAFLSVHELLPMMFYYLLLTKDYSRKES |
| | | ADKVEGIIRKEISNIYAIYDAFANNEINSIADLTCRLQKTNILQGH |
| | | LPKQMISILEGRQKDMEKEAERKIGEMIDDTQRRLDLLCKQTNQ |
| | | KIRIGKRNAGLLKSGKIADWLVSDMMRFQPVQKDTNNAPINNS |
| | | KANSTEYRMLQHALALFGSESSRLKAYFRQMNLVGNANPHPFL |
| | | AETQWEHQTNILSFYRNYLEARKKYLKGLKPQNWKQYQHFLIL |
| | | KVQKTNRNTLVTGWKNSFNLPRGIFTQPIREWFEKHNNSKRIYD |
| | | QILSFDRVGFVAKAIPLYFAEEYKDNVQPFYDYPFNIGNKLKPQ |
| | | KGQFLDKKERVELWQKNKELFKNYPSEKNKTDLAYLDFLSWK |
| | | KFERELRLIKNQDIVTWLMFKELFKTTTVEGLKIGEIHLRDIDTN |
| | | TANEESNNILNRIMPMKLPVKTYETDNKGNILKERPLATFYIEET |
| | | ETKVLKQGNFKVLAKDRRLNGLLSFAETTDIDLEKNPITKLSVD |
| | | YELIKYQTTRISIFEMTLGLEKKLIDKYSTLPTDSFRNMLERWLQ |
| | | CKANRPELKNYVNSLIAVRNAFSHNQYPMYDATLFAEVKKFTL |
| | | FPSVDTKKIELNIAPQLLEIVGKAIKEIEKSENKN |
| Porphyromonas | WP_01 | MTEQNERPYNGTYYTLEDKHFWAAFFNLARHNAYITLAHIDRQ |
| gingivalis | 245841 | LAYSKADITNDEDILFFKGQWKNLDNDLERKARLRSLILKHFSF |
| | 4 | LEGAAYGKKLFESQSSGNKSSKKKELTKKEKEELQANALSLDN |
| | (SEQ | LKSILFDFLQKLKDFRNYYSHYRHPESSELPLFDGNMLQRLYNV |
| | ID No. | FDVSVQRVKRDHEHNDKVDPHRHFNHLVRKGKKDRYGNNDN |
| | 147) | PFFKHHFVDREEKVTEAGLLFFVSLFLEKRDAIWMQKKIRGFKG |
| | | GTETYQQMTNEVFCRSRISLPKLKLESLRTDDWMLLDMLNELV |
| | | RCPKSLYDRLREEDRARFRVPVDILSDEDDTDGTEEDPFKNTLV |
| | | RHQDRFPYFALRYFDLKKVFTSLRFHIDLGTYHFAIYKKNIGEQ |
| | | PEDRHLTRNLYGFGRIQDFAEEHRPEEWKRLVRDLDYFETGDK |
| | | PYITQTTPHYHIEKGKIGLRFVPEGQHLWPSPEVGATRTGRSKY |
| | | AQDKRLTAEAFLSVHELMPMMFYYFLLREKYSDEASAERVQG |
| | | RIKRVIEDVYAVYDAFARGEINTRDELDACLADKGIRRGHLPRQ |
| | | MIGILSQEHKDMEEKVRKKLQEMIVDTDHRLDMLDRQTDRKIR |
| | | IGRKNAGLPKSGVIADWLVRDMMRFQPVAKDTSGKPLNNSKA |
| | | NSTEYRMLQRALALFGGEKERLTPYFRQMNLTGGNNPHPFLHE |
| | | TRWESHTNILSFYRSYLKARKAFLQSIGRSDRVENHRFLLLKEP |
| | | KTDRQTLVAGWKGEFHLPRGIFTEAVRDCLIEMGLDEVGSYKE |
| | | VGFMAKAVPLYFERACKDRVQPFYDYPFNVGNSLKPKKGRFLS |
| | | KEKRAEEWESGKERFRLAKLKKEILEAKEHPYLDFKSWQKFER |
| | | ELRLVKNQDIITWMICRDLMEENKVEGLDTGTLYLKDIRTDVQ |
| | | EQGNLNVLNRVKPMRLPVVVYRADSRGHVHKEQAPLATVYIE |
| | | ERDTKLLKQGNFKSFVKDRRLNGLFSFVDTGALAMEQYPISKL |
| | | RVEYELAKYQTARVCAFEQTLELEESLLTRYPHLPDKNFRKML |
| | | ESWSDPLLDKWPDLHGNVRLLIAVRNAFSHNQYPMYDEAVFSS |
| | | IRKYDPSSPDAIEERMGLNIAHRLSEEVKQAKEMAERIIQA |
| Paludibacter | WP_01 | MKTSANNIYFNGINSFKKIFDSKGAIAPIAEKSCRNFDIKAQNDV |
| propionicigenes | 344610 | NKEQRIHYFAVGHTFKQLDTENLFEYVLDENLRAKRPTRFISLQ |
| | 7 | QFDKEFIENIKRLISDIRNINSHYIHRFDPLKIDAVPTNIIDFLKESF |
| | (SEQ | ELAVIQIYLKEKGINYLQFSENPHADQKLVAFLHDKFLPLDEKK |
| | ID No. | TSMLQNETPQLKEYKEYRKYFKTLSKQAAIDQLLFAEKETDYI |
| | 148) | WNLFDSHPVLTISAGKYLSFYSCLFLLSMFLYKSEANQLISKIKG |
| | | FKKNTTEEEKSKREIFTFFSKRFNSMDIDSEENQLVKFRDLILYL |
| | | NHYPVAWNKDLELDSSNPAMTDKLKSKIIELEINRSFPLYEGNE |
| | | RFATFAKYQIWGKKHLGKSIEKEYINASFTDEEITAYTYETDTCP |
| | | ELKDAHKKLADLKAAKGLFGKRKEKNESDIKKTETSIRELQHEP |
| | | NPIKDKLIQRIEKNLLTVSYGRNQDRFMDFSARFLAEINYFGQD |
| | | ASFKMYHFYATDEQNSELEKYELPKDKKKYDSLKFHQGKLVH |
| | | FISYKEHLKRYESWDDAFVIENNAIQLKLSFDGVENTVTIQRAL |
| | | LIYLLEDALRNIQNNTAENAGKQLLQEYYSHNKADLSAFKQILT |
| | | QQDSIEPQQKTEFKKLLPRRLLNNYSPAINHLQTPHSSLPLILEK |
| | | ALLAEKRYCSLVVKAKAEGNYDDFIKRNKGKQFKLQFIRKAW |
| | | NLMYFRNSYLQNVQAAGHHKSFHIERDEFNDFSRYMFAFEELS |
| | | QYKYYLNEMFEKKGFFENNEFKILFQSGTSLENLYEKTKQKFEI |
| | | WLASNTAKTNKPDNYHLNNYEQQFSNQLFFINLSHFINYLKSTG |
| | | KLQTDANGQIIYEALNNVQYLIPEYYYTDKPERSESKSGNKLYN |
| | | KLKATKLEDALLYEMAMCYLKADKQIADKAKHPITKLLTSDVE |
| | | FNITNKEGIQLYHLLVPFKKIDAFIGLKMHKEQQDKKHPTSFLA |
| | | NIVNYLELVKNDKDIRKTYEAFSTNPVKRTLTYDDLAKIDGHLI |
| | | SKSIKFTNVTLELERYFIFKESLIVKKGNNIDFKYIKGLRNYYNN |
| | | EKKKNEGIRNKAFHFGIPDSKSYDQLIRDAEVMFIANEVKPTHA |
| | | TKYTDLNKQLHTVCDKLMETVHNDYFSKEGDGKKKREAAGQ |
| | | KYFENIISAK |
| Porphyromonas | WP_01 | MTEQNEKPYNGTYYTLEDKHFWAAFFNLARHNAYITLAHIDRQ |
| gingivalis | 381615 | LAYSKADITNDEDILFFKGQWKNLDNDLERKARLRSLILKHFSF |
| | 5 | LEGAAYGKKLFESQSSGNKSSKNKELTKKEKEELQANALSLDN |
| | (SEQ | LKSILFDFLQKLKDFRNYYSHYRHPESSELPLFDGNMLQRLYNV |
| | ID No. | FDVSVQRVKRDHEHNDKVDPHRHFNHLVRKGKKDRYGNNDN |
| | 149) | PFFKHHFVDREGTVTEAGLLFFVSLFLEKRDAIWMQKKIRGFKG |
| | | GTETYQQMTNEVFCRSRISLPKLKLESLRTDDWMLLDMLNELV |
| | | RCPKSLYDRLREEDRARFRVPVDILSDEEDTDGAEEDPFKNTLV |
| | | RHQDRFPYFALRYFDLKKVFTSLRFQIDLGTYHFAIYKKNIGEQ |
| | | PEDRHLTRNLYGFGRIQDFAEEHRPEEWKRLVRDLDYFETGDK |
| | | PYITQTTPHYHIEKGKIGLRFVPEGQHLWPSPEVGATRTGRSKY |
| | | AQDKRFTAEAFLSAHELMPMMFYYFLLREKYSEEASAERVQGR |
| | | IKRVIEDVYAVYDAFARDEINTRDELDACLADKGIRRGHLPRQ |
| | | MIGILSQEHKDMEEKIRKKLQEMMADTDHRLDMLDRQTDRKIR |
| | | IGRKNAGLPKSGVIADWLVRDMMRFQPVAKDTSGKPLNNSKA |
| | | NSTEYRMLQRALALFGGEKERLTPYFRQMNLTGGNNPHPFLHE |
| | | TRWESHTNILSFYRSYLKARKAFLQSIGRSDRVENHRFLLLKEP |
| | | KTDRQTLVAGWKGEFHLPRGIFTEAVRDCLIEMGLDEVGSYKE |
| | | VGFMAKAVPLYFERACKDWVQPFYNYPFNVGNSLKPKKGRFL |
| | | SKEKRAEEWESGKERFRLAKLKKEILEAKEHPYLDFKSWQKFE |
| | | RELRLVKNQDIITWMICGDLMEENKVEGLDTGTLYLKDIRTDV |
| | | QEQGSLNVLNRVKPMRLPVVVYRADSRGHVHKEQAPLATVYI |
| | | EERDTKLLKQGNFKSFVKDRRLNGLFSFVDTGALAMEQYPISK |
| | | LRVEYELAKYQTARVCAFEQTLELEESLLTRCPHLPDKNFRKM |
| | | LESWSDPLLDKWPDLHRKVRLLIAVRNAFSHNQYPMYDEAVFS |
| | | SIRKYDPSFPDAIEERMGLNIAHRLSEEVKQAKETVERIIQA |
| Flavobacterium | WP_01 | MSSKNESYNKQKTFNHYKQEDKYFFGGFLNNADDNLRQVGKE |
| columnare | 416554 | FKTRINFNHNNNELASVFKDYFNKEKSVAKREHALNLLSNYFP |
| | 1 | VLERIQKHTNHNFEQTREIFELLLDTIKKLRDYYTHHYHKPITIN |
| | (SEQ | PKIYDFLDDTLLDVLITIKKKKVKNDTSRELLKEKLRPELTQLKN |
| | ID No. | QKREELIKKGKKLLEENLENAVFNHCLRPFLEENKTDDKQNKT |
| | 150) | VSLRKYRKSKPNEETSITLTQSGLVFLMSFFLHRKEFQVFTSGLE |
| | | GFKAKVNTIKEEEISLNKNNIVYMITHWSYSYYNFKGLKHRIKT |
| | | DQGVSTLEQNNTTHSLTNTNTKEALLTQIVDYLSKVPNEIYETL |
| | | SEKQQKEFEEDINEYMRENPENEDSTFSSIVSHKVIRKRYENKFN |
| | | YFAMRFLDEYAELPTLRFMVNFGDYIKDRQKKILESIQFDSERII |
| | | KKEIHLFEKLSLVTEYKKNVYLKETSNIDLSRFPLFPNPSYVMA |
| | | NNNIPFYIDSRSNNLDEYLNQKKKAQSQNKKRNLTFEKYNKEQ |
| | | SKDAIIAMLQKEIGVKDLQQRSTIGLLSCNELPSMLYEVIVKDIK |
| | | GAELENKIAQKIREQYQSIRDFTLDSPQKDNIPTTLIKTINTDSSV |
| | | TFENQPIDIPRLKNAIQKELTLTQEKLLNVKEHEIEVDNYNRNKN |
| | | TYKFKNQPKNKVDDKKLQRKYVFYRNEIRQEANWLASDLIHF |
| | | MKNKSLWKGYMHNELQSFLAFFEDKKNDCIALLETVFNLKED |
| | | CILTKGLKNLFLKHGNFIDFYKEYLKLKEDFLNTESTFLENGLIG |
| | | LPPKILKKELSKRFKYIFIVFQKRQFIIKELEEKKNNLYADAINLS |
| | | RGIFDEKPTMIPFKKPNPDEFASWFVASYQYNNYQSFYELTPDI |
| | | VERDKKKKYKNLRAINKVKIQDYYLKLMVDTLYQDLFNQPLD |
| | | KSLSDFYVSKAEREKIKADAKAYQKRNDSSLWNKVIHLSLQNN |
| | | RITANPKLKDIGKYKRALQDEKIATLLTYDDRTWTYALQKPEK |
| | | ENENDYKELHYTALNMELQEYEKVRSKELLKQVQELEKQILEE |
| | | YTDFLSTQIHPADFEREGNPNFKKYLAHSILENEDDLDKLPEKV |
| | | EAMRELDETITNPIIKKAIVLIIIRNKMAHNQYPPKFIYDLANRFV |
| | | PKKEEEYFATYFNRVFETITKELWENKEKKDKTQV |
| Psychroflexus | WP_01 | MESIIGLGLSFNPYKTADKHYFGSFLNLVENNLNAVFAEFKERIS |
| torquis | 502476 | YKAKDENISSLIEKHFIDNMSIVDYEKKISILNGYLPIIDFLDDELE |
| | 5 | NNLNTRVKNFKKNFIILAEAIEKLRDYYTHFYHDPITFEDNKEPL |
| | (SEQ | LELLDEVLLKTILDVKKKYLKTDKTKEILKDSLREEMDLLVIRK |
| | ID No. | TDELREKKKTNPKIQHTDSSQIKNSIFNDAFQGLLYEDKGNNKK |
| | 151) | TQVSHRAKTRLNPKDIHKQEERDFEIPLSTSGLVFLMSLFLSKKE |
| | | IEDFKSNIKGFKGKVVKDENHNSLKYMATHRVYSILAFKGLKY |
| | | RIKTDTFSKETLMMQMIDELSKVPDCVYQNLSETKQKDFIEDW |
| | | NEYFKDNEENTENLENSRVVHPVIRKRYEDKFNYFAIRFLDEFA |
| | | NFKTLKFQVFMGYYIHDQRTKTIGTTNITTERTVKEKINVFGKL |
| | | SKMDNLKKHFFSQLSDDENTDWEFFPNPSYNFLTQADNSPANN |
| | | IPIYLELKNQQIIKEKDAIKAEVNQTQNRNPNKPSKRDLLNKILK |
| | | TYEDFHQGDPTAILSLNEIPALLHLFLVKPNNKTGQQIENIIRIKIE |
| | | KQFKAINHPSKNNKGIPKSLFADTNVRVNAIKLKKDLEAELDM |
| | | LNKKHIAFKENQKASSNYDKLLKEHQFTPKNKRPELRKYVFYK |
| | | SEKGEEATWLANDIKRFMPKDFKTKWKGCQHSELQRKLAFYD |
| | | RHTKQDIKELLSGCEFDHSLLDINAYFQKDNFEDFFSKYLENRIE |
| | | TLEGVLKKLHDFKNEPTPLKGVFKNCFKFLKRQNYVTESPEIIK |
| | | KRILAKPTFLPRGVFDERPTMKKGKNPLKDKNEFAEWFVEYLE |
| | | NKDYQKFYNAEEYRMRDADFKKNAVIKKQKLKDFYTLQMVN |
| | | YLLKEVFGKDEMNLQLSELFQTRQERLKLQGIAKKQMNKETG |
| | | DSSENTRNQTYIWNKDVPVSFFNGKVTIDKVKLKNIGKYKRYE |
| | | RDERVKTFIGYEVDEKWMMYLPHNWKDRYSVKPINVIDLQIQE |
| | | YEEIRSHELLKEIQNLEQYIYDHTTDKNILLQDGNPNFKMYVLN |
| | | GLLIGIKQVNIPDFIVLKQNTNFDKIDFTGIASCSELEKKTIILIAIR |
| | | NKFAHNQLPNKMIYDLANEFLKIEKNETYANYYLKVLKKMISD |
| | | LA |
| Riemerella | WP_01 | MFFSFHNAQRVIFKHLYKAFDASLRMVKEDYKAHFTVNLTRDF |
| anatipestifer | 534562 | AHLNRKGKNKQDNPDFNRYRFEKDGFFTESGLLFFTNLFLDKR |
| | 0 | DAYWMLKKVSGFKASHKQREKMTTEVFCRSRILLPKLRLESRY |
| | (SEQ | DHNQMLLDMLSELSRCPKLLYEKLSEENKKHFQVEADGFLDEI |
| | ID No. | EEEQNPFKDTLIRHQDRFPYFALRYLDLNESFKSIRFQVDLGTYH |
| | 152) | YCIYDKKIGDEQEKRHLTRTLLSFGRLQDFTEINRPQEWKALTK |
| | | DLDYKETSNQPFISKTTPHYHITDNKIGFRLGTSKELYPSLEIKDG |
| | | ANRIAKYPYNSGFVAHAFISVHELLPLMFYQHLTGKSEDLLKET |
| | | VRHIQRIYKDFEEERINTIEDLEKANQGRLPLGAFPKQMLGLLQ |
| | | NKQPDLSEKAKIKIEKLIAETKLLSHRLNTKLKSSPKLGKRREKL |
| | | IKTGVLADWLVKDFMRFQPVAYDAQNQPIKSSKANSTEFWFIR |
| | | RALALYGGEKNRLEGYFKQTNLIGNTNPHPFLNKFNWKACRNL |
| | | VDFYQQYLEQREKFLEAIKHQPWEPYQYCLLLKVPKENRKNLV |
| | | KGWEQGGISLPRGLFTEAIRETLSKDLTLSKPIRKEIKKHGRVGFI |
| | | SRAITLYFKEKYQDKHQSFYNLSYKLEAKAPLLKKEEHYEYWQ |
| | | QNKPQSPTESQRLELHTSDRWKDYLLYKRWQHLEKKLRLYRN |
| | | QDIMLWLMTLELTKNHFKELNLNYHQLKLENLAVNVQEADAK |
| | | LNPLNQTLPMVLPVKVYPTTAFGEVQYHETPIRTVYIREEQTKA |
| | | LKMGNFKALVKDRRLNGLFSFIKEENDTQKHPISQLRLRRELEI |
| | | YQSLRVDAFKETLSLEEKLLNKHASLSSLENEFRTLLEEWKKKY |
| | | AASSMVTDKHIAFIASVRNAFCHNQYPFYKETLHAPILLFTVAQ |
| | | PTTEEKDGLGIAEALLKVLREYCEIVKSQI |
| Prevotella | WP_02 | MENDKRLEESACYTLNDKHFWAAFLNLARHNVYITVNHINKTL |
| pleuritidis | 158463 | ELKNKKNQEIIIDNDQDILAIKTHWAKVNGDLNKTDRLRELMIK |
| | 5 | HFPFLEAAIYSNNKEDKEEVKEEKQAKAQSFKSLKDCLFLFLEK |
| | (SEQ | LQEARNYYSHYKYSESSKEPEFEEGLLEKMYNTFDASIRLVKED |
| | ID No. | YQYNKDIDPEKDFKHLERKEDFNYLFTDKDNKGKITKNGLLFF |
| | 153) | VSLFLEKKDAIWMQQKFRGFKDNRGNKEKMTHEVFCRSRMLL |
| | | PKIRLESTQTQDWILLDMLNELIRCPKSLYERLQGAYREKFKVP |
| | | FDSIDEDYDAEQEPFRNTLVRHQDRFPYFALRYFDYNEIFKNLR |
| | | FQIDLGTYHFSIYKKLIGGKKEDRHLTHKLYGFERIQEFTKQNRP |
| | | DKWQAIIKDLDTYETSNERYISETTPHYHLENQKIGIRFRNDNN |
| | | DIWPSLKTNGEKNEKSKYNLDKPYQAEAFLSVHELLPMMFYYL |
| | | LLKMENTDNDKEDNEVGTKKKGNKNNKQEKHKIEEIIENKIKDI |
| | | YALYDAFTNGEINSIDELAEQREGKDIEIGHLPKQLIVILKNKSK |
| | | DMAEKANRKQKEMIKDTKKRLATLDKQVKGEIEDGGRNIRLL |
| | | KSGEIARWLVNDMMRFQPVQKDNEGKPLNNSKANSTEYQMLQ |
| | | RSLALYNKEEKPTRYFRQVNLIKSSNPHPFLEDTKWEECYNILSF |
| | | YRNYLKAKIKFLNKLKPEDWKKNQYFLMLKEPKTNRKTLVQG |
| | | WKNGFNLPRGIFTEPIKEWFKRHQNDSEEYKKVEALDRVGLVA |
| | | KVIPLFFKEEYFKEDAQKEINNCVQPFYSFPYNVGNIHKPEEKNF |
| | | LHCEERRKLWDKKKDKFKGYKAKEKSKKMTDKEKEEHRSYLE |
| | | FQSWNKFERELRLVRNQDILTWLLCTKLIDKLKIDELNIEELQKL |
| | | RLKDIDTDTAKKEKNNILNRVMPMRLPVTVYEIDKSFNIVKDKP |
| | | LHTVYIEETGTKLLKQGNFKALVKDRRLNGLFSFVKTSSEAESK |
| | | SKPISKLRVEYELGAYQKARIDIIKDMLALEKTLIDNDENLPTNK |
| | | FSDMLKSWLKGKGEANKARLQNDVGLLVAVRNAFSHNQYPM |
| | | YNSEVFKGMKLLSLSSDIPEKEGLGIAKQLKDKIKETIERIIEIEKE |
| | | IRN |
| Porphyromonas | WP_02 | MNTVPASENKGQSRTVEDDPQYFGLYLNLARENLIEVESHVRIK |
| gingivalis | 166319 | FGKKKLNEESLKQSLLCDHLLSVDRWTKVYGHSRRYLPFLHYF |
| | 7 | DPDSQIEKDHDSKTGVDPDSAQRLIRELYSLLDFLRNDFSHNRL |
| | (SEQ | DGTTFEHLEVSPDISSFITGTYSLACGRAQSRFADFFKPDDFVLA |
| | ID No. | KNRKEQLISVADGKECLTVSGLAFFICLFLDREQASGMLSRIRGF |
| | 154) | KRTDENWARAVHETFCDLCIRHPHDRLESSNTKEALLLDMLNE |
| | | LNRCPRILYDMLPEEERAQFLPALDENSMNNLSENSLNEESRLL |
| | | WDGSSDWAEALTKRIRHQDRFPYLMLRFIEEMDLLKGIRFRVD |
| | | LGEIELDSYSKKVGRNGEYDRTITDHALAFGKLSDFQNEEEVSR |
| | | MISGEASYPVRFSLFAPRYAIYDNKIGYCHTSDPVYPKSKTGEK |
| | | RALSNPRSMGFISVHDLRKLLLMELLCEGSFSRMQSDFLRKANR |
| | | ILDETAEGKLQFSALFPEMRHRFIPPQNPKSKDRREKAETTLEKY |
| | | KQEIKGRKDKLNSQLLSAFDMDQRQLPSRLLDEWMNIRPASHS |
| | | VKLRTYVKQLNEDCRLRLQKFRKDGDGKARAIPLVGEMATFLS |
| | | QDIVRMIISEETKKLITSAYYNEMQRSLAQYAGEENRHQFRAIV |
| | | AELRLLDPSSGHPFLSATMETAHRYTEDFYKCYLEKKREWLAK |
| | | TFYRPEQDENTKRRISVFFVPDGEARKLLPLLIRRRMKEQNDLQ |
| | | DWIRNKQAHPIDLPSHLFDSKIMELLKVKDGKKKWNEAFKDW |
| | | WSTKYPDGMQPFYGLRRELNIHGKSVSYIPSDGKKFADCYTHL |
| | | MEKTVQDKKRELRTAGKPVPPDLAADIKRSFHRAVNEREFMLR |
| | | LVQEDDRLMLMAINKMMTDREEDILPGLKNIDSILDEENQFSLA |
| | | VHAKVLEKEGEGGDNSLSLVPATIEIKSKRKDWSKYIRYRYDR |
| | | RVPGLMSHFPEHKATLDEVKTLLGEYDRCRIKIFDWAFALEGAI |
| | | MSDRDLKPYLHESSSREGKSGEHSTLVKMLVEKKGCLTPDESQ |
| | | YLILIRNKAAHNQFPCAAEMPLIYRDVSAKVGSIEGSSAKDLPE |
| | | GSSLVDSLWKKYEMIIRKILPILDPENRFFGKLLNNMSQPINDL |
| Porphyromonas | WP_02 | MNTVPASENKGQSRTVEDDPQYFGLYLNLARENLIEVESHVRIK |
| gingivalis | 166547 | FGKKKLNEESLKQSLLCDHLLSVDRWTKVYGHSRRYLPFLHYF |
| | 5 | DPDSQIEKDHDSKTGVDPDSAQRLIRELYSLLDFLRNDFSHNRL |
| | (SEQ | DGTTFEHLEVSPDISSFITGTYSLACGRAQSRFADFFKPDDFVLA |
| | ID No. | KNRKEQLISVADGKECLTVSGLAFFICLFLDREQASGMLSRIRGF |
| | 155) | KRTNENWARAVHETFCDLCIRHPHDRLESSNTKEALLLDMLNE |
| | | LNRCPRILYDMLPEEERAQFLPALDENSMNNLSENSLNEESRLL |
| | | WDGSSDWAEALTKRIRHQDRFPYLMLRFIEEMDLLKGIRFRVD |
| | | LGEIELDSYSKKVGRNGEYDRTITDHALAFGKLSDFQNEEEVSR |
| | | MISGEASYPVRFSLFAPRYAIYDNKIGYCHTSDPVYPKSKTGEK |
| | | RALSNPQSMGFISVHDLRKLLLMELLCEGSFSRMQSGFLRKANR |
| | | ILDETAEGKLQFSALFPEMRHRFIPPQNPKSKDRREKAETTLEKY |
| | | KQEIKGRKDKLNSQLLSAFDMNQRQLPSRLLDEWMNIRPASHS |
| | | VKLRTYVKQLNEDCRLRLRKFRKDGDGKARAIPLVGEMATFLS |
| | | QDIVRMIISEETKKLITSAYYNEMQRSLAQYAGEENRRQFRAIV |
| | | AELHLLDPSSGHPFLSATMETAHRYTEDFYKCYLEKKREWLAK |
| | | TFYRPEQDENTKRRISVFFVPDGEARKLLPLLIRRRMKEQNDLQ |
| | | DWIRNKQAHPIDLPSHLFDSKIMELLKVKDGKKKWNEAFKDW |
| | | WSTKYPDGMQPFYGLRRELNIHGKSVSYIPSDGKKFADCYTHL |
| | | MEKTVQDKKRELRTAGKPVPPDLAADIKRSFHRAVNEREFMLR |
| | | LVQEDDRLMLMAINKMMTDREEDILPGLKNIDSILDKENQFSLA |
| | | VHAKVLEKEGEGGDNSLSLVPATIEIKSKRKDWSKYIRYRYDR |
| | | RVPGLMSHFPEHKATLDEVKTLLGEYDRCRIKIFDWAFALEGAI |
| | | MSDRDLKPYLHESSSREGKSGEHSTLVKMLVEKKGCLTPDESQ |
| | | YLILIRNKAAHNQFPCAAEMPLIYRDVSAKVGSIEGSSAKDLPE |
| | | GSSLVDSLWKKYEMIIRKILPILDHENRFFGKLLNNMSQPINDL |
| Porphyromonas | WP_02 | MNTVPASENKGQSRTVEDDPQYFGLYLNLARENLIEVESHVRIK |
| gingivalis | 167765 | FGKKKLNEESLKQSLLCDHLLSVDRWTKVYGHSRRYLPFLHYF |
| | 7 | DPDSQIEKDHDSKTGVDPDSAQRLIRELYSLLDFLRNDFSHNRL |
| | (SEQ | DGTTFEHLEVSPDISSFITGTYSLACGRAQSRFADFFKPDDFVLA |
| | ID No. | KNRKEQLISVADGKECLTVSGLAFFICLFLDREQASGMLSRIRGF |
| | 156) | KRTDENWARAVHETFCDLCIRHPHDRLESSNTKEALLLDMLNE |
| | | LNRCPRILYDMLPEEERAQFLPALDENSMNNLSENSLNEESRLL |
| | | WDGSSDWAEALTKRIRHQDRFPYLMLRFIEEMDLLKGIRFRVD |
| | | LGEIELDSYSKKVGRNGEYDRTITDHALAFGKLSDFQNEEEVSR |
| | | MISGEASYPVRFSLFAPRYAIYDNKIGYCHTSDPVYPKSKTGEK |
| | | RALSNPQSMGFISVHDLRKLLLMELLCEGSFSRMQSGFLRKANR |
| | | ILDETAEGKLQFSALFPEMRHRFIPPQNPKSKDRREKAETTLEKY |
| | | KQEIKGRKDKLNSQLLSAFDMNQRQLPSRLLDEWMNIRPASHS |
| | | VKLRTYVKQLNEDCRLRLRKFRKDGDGKARAIPLVGEMATFLS |
| | | QDIVRMIISEETKKLITSAYYNEMQRSLAQYAGEENRRQFRAIV |
| | | AELHLLDPSSGHPFLSATMETAHRYTEDFYKCYLEKKREWLAK |
| | | TFYRPEQDENTKRRISVFFVPDGEARKLLPLLIRRRMKEQNDLQ |
| | | DWIRNKQAHPIDLPSHLFDSKIMELLKVKDGKKKWNEAFKDW |
| | | WSTKYPDGMQPFYGLRRELNIHGKSVSYIPSDGKKFADCYTHL |
| | | MEKTVQDKKRELRTAGKPVPPDLAADIKRSFHRAVNEREFMLR |
| | | LVQEDDRLMLMAINKMMTDREEDILPGLKNIDSILDEENQFSLA |
| | | VHAKVLEKEGEGGDNSLSLVPATIEIKSKRKDWSKYIRYRYDR |
| | | RVPGLMSHFPEHKATLDEVKTLLGEYDRCRIKIFDWAFALEGAI |
| | | MSDRDLKPYLHESSSREGKSGEHSTLVKMLVEKKGCLTPDESQ |
| | | YLILIRNKAAHNQFPCAAEMPLIYRDVSAKVGSIEGSSAKDLPE |
| | | GSSLVDSLWKKYEMIIRKILPILDHENRFFGKLLNNMSQPINDL |
| Porphyromonas | WP_02 | MNTVPASENKGQSRTVEDDPQYFGLYLNLARENLIEVESHVRIK |
| gingivalis | 168001 | FGKKKLNEESLKQSLLCDHLLSVDRWTKVYGHSRRYLPFLHYF |
| | 2 | DPDSQIEKDHDSKTGVDPDSAQRLIRELYSLLDFLRNDFSHNRL |
| | (SEQ | DGTTFEHLEVSPDISSFITGTYSLACGRAQSRFADFFKPDDFVLA |
| | ID No. | KNRKEQLISVADGKECLTVSGLAFFICLFLDREQASGMLSRIRGF |
| | 157) | KRTDENWARAVHETFCDLCIRHPHDRLESSNTKEALLLDMLNE |
| | | LNRCPRILYDMLPEEERAQFLPALDENSMNNLSENSLNEESRLL |
| | | WDGSSDWAEALTKRIRHQDRFPYLMLRFIEEMDLLKGIRFRVD |
| | | LGEIELDSYSKKVGRNGEYDRTITDHALAFGKLSDFQNEEEVSR |
| | | MISGEASYPVRFSLFAPRYAIYDNKIGYCHTSDPVYPKSKTGEK |
| | | RALSNPRSMGFISVHDLRKLLLMELLCEGSFSRMQSDFLRKANR |
| | | ILDETAEGKLQFSALFPEMRHRFIPPQNPKSKDRREKAETTLEKY |
| | | KQEIKGRKDKLNSQLLSAFDMDQRQLPSRLLDEWMNIRPASHS |
| | | VKLRTYVKQLNEDCRLRLQKFRKDGDGKARAIPLVGEMATFLS |
| | | QDIVRMIISEETKKLITSAYYNEMQRSLAQYAGEENRHQFRAIV |
| | | AELRLLDPSSGHPFLSATMETAHRYTEDFYKCYLEKKREWLAK |
| | | TFYRPEQDENTKRRISVFFVPDGEARKLLPLLIRRRMKEQNDLQ |
| | | DWIRNKQAHPIDLPSHLFDSKVMELLKVKDGKKKWNEAFKDW |
| | | WSTKYPDGMQPFYGLRRELNIHGKSVSYIPSDGKKFADCYTHL |
| | | MEKTVRDKKRELRTAGKPVPPDLAAYIKRSFHRAVNEREFMLR |
| | | LVQEDDRLMLMAINKIMTDREEDILPGLKNIDSILDKENQFSLA |
| | | VHAKVLEKEGEGGDNSLSLVPATIEIKSKRKDWSKYIRYRYDR |
| | | RVPGLMSHFPEHKATLDEVKTLLGEYDRCRIKIFDWAFALEGAI |
| | | MSDRDLKPYLHESSSREGKSGEHSTLVKMLVEKKGCLTPDESQ |
| | | YLILIRNKAAHNQFPCAAEIPLIYRDVSAKVGSIEGSSAKDLPEG |
| | | SSLVDSLWKKYEMIIRKILPILDPENRFFGKLLNNMSQPINDL |
| Porphyromonas | WP_02 | MNTVPASENKGQSRTVEDDPQYFGLYLNLARENLIEVESHVRIK |
| gingivalis | 384676 | FGKKKLNEESLKQSLLCDHLLSVDRWTKVYGHSRRYLPFLHYF |
| | 7 | DPDSQIEKDHDSKTGVDPDSAQRLIRELYSLLDFLRNDFSHNRL |
| | (SEQ | DGTTFEHLEVSPDISSFITGTYSLACGRAQSRFADFFKPDDFVLA |
| | ID No. | KNRKEQLISVADGKECLTVSGLAFFICLFLDREQASGMLSRIRGF |
| | 158) | KRTDENWARAVHETFCDLCIRHPHDRLESSNTKEALLLDMLNE |
| | | LNRCPRILYDMLPEEERAQFLPALDENSMNNLSENSLNEESRLL |
| | | WDGSSDWAEALTKRIRHQDRFPYLMLRFIEEMDLLKGIRFRVD |
| | | LGEIELDSYSKKVGRNGEYDRTITDHALAFGKLSDFQNEEEVSR |
| | | MISGEASYPVRFSLFAPRYAIYDNKIGYCHTSDPVYPKSKTGEK |
| | | RALSNPRSMGFISVHDLRKLLLMELLCEGSFSRMQSDFLRKANR |
| | | ILDETAEGKLQFSALFPEMRHRFIPPQNPKSKDRREKAETTLEKY |
| | | KQEIKGRKDKLNSQLLSAFDMNQRQLPSRLLDEWMNIRPASHS |
| | | VKLRTYVKQLNEDCRLRLRKFRKDGDGKARAIPLVGEMATFLS |
| | | QDIVRMIISEETKKLITSAYYNEMQRSLAQYAGEENRRQFRAIV |
| | | AELHLLDPSSGHPFLSATMETAHRYTEDFYKCYLEKKREWLAK |
| | | TFYRPEQDENTKRRISVFFVPDGEARKLLPLLIRRRMKEQNDLQ |
| | | DWIRNKQAHPIDLPSHLFDSKIMELLKVKDGKKKWNEAFKDW |
| | | WSTKYPDGMQPFYGLRRELNIHGKSVSYIPSDGKKFADCYTHL |
| | | MEKTVQDKKRELRTAGKPVPPDLAADIKRSFHRAVNEREFMLR |
| | | LVQEDDRLMLMAINKMMTDREEDILPGLKNIDSILDEENQFSLA |
| | | VHAKVLEKEGEGGDNSLSLVPATIEIKSKRKDWSKYIRYRYDR |
| | | RVPGLMSHFPEHKATLDEVKTLLGEYDRCRIKIFDWAFALEGAI |
| | | MSDRDLKPYLHESSSREGKSGEHSTLVKMLVEKKGCLTPDESQ |
| | | YLILIRNKAAHNQFPCAAEMPLIYRDVSAKVGSIEGSSAKDLPE |
| | | GSSLVDSLWKKYEMIIRKILPILDPENRFFGKLLNNMSQPINDL |
| Prevotella | WP_03 | MKNDNNSTKSTDYTLGDKHFWAAFLNLARHNVYITVNHINKV |
| falsenii | 688492 | LELKNKKDQEIIIDNDQDILAIKTLWGKVDTDINKKDRLRELIM |
| | 9 | KHFPFLEAATYQQSSTNNTKQKEEEQAKAQSFESLKDCLFLFLE |
| | (SEQ | KLREARNYYSHYKHSKSLEEPKLEEKLLENMYNIFDTNVQLVIK |
| | ID No. | DYEHNKDINPEEDFKHLGRAEGEFNYYFTRNKKGNITESGLLFF |
| | 159) | VSLFLEKKDAIWAQTKIKGFKDNRENKQKMTHEVFCRSRMLLP |
| | | KLRLESTQTQDWILLDMLNELIRCPKSLYKRLQGEKREKFRVPF |
| | | DPADEDYDAEQEPFKNTLVRHQDRFPYFALRYFDYNEIFTNLRF |
| | | QIDLGTYHFSIYKKQIGDKKEDRHLTHKLYGFERIQEFAKENRP |
| | | DEWKALVKDLDTFEESNEPYISETTPHYHLENQKIGIRNKNKKK |
| | | KKTIWPSLETKTTVNERSKYNLGKSFKAEAFLSVHELLPMMFY |
| | | YLLLNKEEPNNGKINASKVEGIIEKKIRDIYKLYGAFANEEINNE |
| | | EELKEYCEGKDIAIRHLPKQMIAILKNEYKDMAKKAEDKQKKM |
| | | IKDTKKRLAALDKQVKGEVEDGGRNIKPLKSGRIASWLVNDM |
| | | MRFQPVQRDRDGYPLNNSKANSTEYQLLQRTLALFGSERERLA |
| | | PYFRQMNLIGKDNPHPFLKDTKWKEHNNILSFYRSYLEAKKNF |
| | | LGSLKPEDWKKNQYFLKLKEPKTNRETLVQGWKNGFNLPRGIF |
| | | TEPIREWFIRHQNESEEYKKVKDFDRIGLVAKVIPLFFKEDYQKE |
| | | IEDYVQPFYGYPFNVGNIHNSQEGTFLNKKEREELWKGNKTKF |
| | | KDYKTKEKNKEKTNKDKFKKKTDEEKEEFRSYLDFQSWKKFE |
| | | RELRLVRNQDIVTWLLCMELIDKLKIDELNIEELQKLRLKDIDTD |
| | | TAKKEKNNILNRIMPMELPVTVYETDDSNNIIKDKPLHTIYIKEA |
| | | ETKLLKQGNFKALVKDRRLNGLFSFVETSSEAELKSKPISKSLVE |
| | | YELGEYQRARVEIIKDMLRLEETLIGNDEKLPTNKFRQMLDKW |
| | | LEHKKETDDTDLKNDVKLLTEVRNAFSHNQYPMRDRIAFANIK |
| | | PFSLSSANTSNEEGLGIAKKLKDKTKETIDRIIEIEEQTATKR |
| Prevotella | WP_03 | MENDKRLEESTCYTLNDKHFWAAFLNLARHNVYITINHINKLL |
| pleuritidis | 693148 | EIRQIDNDEKVLDIKALWQKVDKDINQKARLRELMIKHFPFLEA |
| | 5 | AIYSNNKEDKEEVKEEKQAKAQSFKSLKDCLFLFLEKLQEARN |
| | (SEQ | YYSHYKSSESSKEPEFEEGLLEKMYNTFGVSIRLVKEDYQYNKD |
| | ID No. | IDPEKDFKHLERKEDFNYLFTDKDNKGKITKNGLLFFVSLFLEK |
| | 160) | KDAIWMQQKLRGFKDNRGNKEKMTHEVFCRSRMLLPKIRLES |
| | | TQTQDWILLDMLNELIRCPKSLYERLQGAYREKFKVPFDSIDED |
| | | YDAEQEPFRNTLVRHQDRFPYFALRYFDYNEIFKNLRFQIDLGT |
| | | YHFSIYKKLIGDNKEDRHLTHKLYGFERIQEFAKQKRPNEWQA |
| | | LVKDLDIYETSNEQYISETTPHYHLENQKIGIRFKNKKDKIWPSL |
| | | ETNGKENEKSKYNLDKSFQAEAFLSIHELLPMMFYDLLLKKEEP |
| | | NNDEKNASIVEGFIKKEIKRMYAIYDAFANEEINSKEGLEEYCK |
| | | NKGFQERHLPKQMIAILTNKSKNMAEKAKRKQKEMIKDTKKR |
| | | LATLDKQVKGEIEDGGRNIRLLKSGEIARWLVNDMMRFQSVQK |
| | | DKEGKPLNNSKANSTEYQMLQRSLALYNKEQKPTPYFIQVNLI |
| | | KSSNPHPFLEETKWEECNNILSFYRSYLEAKKNFLESLKPEDWK |
| | | KNQYFLMLKEPKTNRKTLVQGWKNGFNLPRGIFTEPIKEWFKR |
| | | HQNDSEEYKKVEALDRVGLVAKVIPLFFKEEYFKEDAQKEINN |
| | | CVQPFYSFPYNVGNIHKPEEKNFLHCEERRKLWDKKKDKFKGY |
| | | KAKEKSKKMTDKEKEEHRSYLEFQSWNKFERELRLVRNQDIVT |
| | | WLLCTELIDKLKIDELNIEELQKLRLKDIDTDTAKKEKNNILNRI |
| | | NIPMQLPVTVYEIDKSFNIVKDKPLHTIYIEETGTKLLKQGNFKA |
| | | LVKDRRLNGLFSFVKTSSEAESKSKPISKLRVEYELGAYQKARI |
| | | DIIKDMLALEKTLIDNDENLPTNKFSDMLKSWLKGKGEANKAR |
| | | LQNDVDLLVAIRNAFSHNQYPMYNSEVFKGMKLLSLSSDIPEKE |
| | | GLGIAKQLKDKIKETIERIIEIEKEIRN |
| [Porphyromonas | WP_03 | MTEQNERPYNGTYYTLEDKHFWAAFFNLARHNAYITLAHIDRQ |
| gingivalis | 941739 | LAYSKADITNDEDILFFKGQWKNLDNDLERKARLRSLILKHFSF |
| | 0 | LEGAAYGKKLFESQSSGNKSSKKKELTKKEKEELQANALSLDN |
| | (SEQ | LKSILFDFLQKLKDFRNYYSHYRHPESSELPLFDGNMLQRLYNV |
| | ID No. | FDVSVQRVKRDHEHNDKVDPHRHFNHLVRKGKKDRYGNNDN |
| | 161) | PFFKHHFVDREGTVTEAGLLFFVSLFLEKRDAIWMQKKIRGFKG |
| | | GTEAYQQMTNEVFCRSRISLPKLKLESLRTDDWMLLDMLNELV |
| | | RCPKSLYDRLREEDRARFRVPIDILSDEDDTDGTEEDPFKNTLVR |
| | | HQDRFPYFALRYFDLKKVFTSLRFHIDLGTYHFAIYKKNIGEQPE |
| | | DRHLTRNLYGFGRIQDFAEEHRPEEWKRLVRDLDYFETGDKPY |
| | | ITQTTPHYHIEKGKIGLRFVPEGQHLWPSPEVGATRTGRSKYAQ |
| | | DKRLTAEAFLSVHELNIPMNIFYYFLLREKYSEEVSAEKVQGRIK |
| | | RVIEDVYAVYDAFARGEIDTLDRLDACLADKGIRRGHLPRQMI |
| | | AILSQEHKDMEEKVRKKLQEMIADTDHRLDMLDRQTDRKIRIG |
| | | RKNAGLPKSGVIADWLVRDMMRFQPVAKDTSGKPLNNSKANS |
| | | TEYRMLQRALALFGGEKERLTPYFRQMNLTGGNNPHPFLHETR |
| | | WESHTNILSFYRSYLKARKAFLQSIGRSDREENHRFLLLKEPKT |
| | | DRQTLVAGWKSEFHLPRGIFTEAVRDCLIEMGYDEVGSYKEVG |
| | | FMAKAVPLYFERACKDRVQPFYDYPFNVGNSLKPKKGRFLSKE |
| | | KRAEEWESGKERFRLAKLKKEILEAKEHPYLDFKSWQKFEREL |
| | | RLVKNQDIITWMMCRDLMEENKVEGLDTGTLYLKDIRTDVHE |
| | | QGSLNVLNRVKPMRLPVVVYRADSRGHVHKEQAPLATVYIEE |
| | | RDTKLLKQGNFKSFVKDRRLNGLFSFVDTGALAMEQYPISKLR |
| | | VEYELAKYQTARVCAFEQTLELEESLLTRYPHLPDKNFRKMLE |
| | | SWSDPLLDKWPDLHRKVRLLIAVRNAFSHNQYPMYDEAVFSSI |
| | | RKYDPSSPDAIEERMGLNIAHRLSEEVKQAKEMAERIIQV |
| Porphyromonas | WP_03 | MTEQSERPYNGTYYTLEDKHFWAAFLNLARHNAYITLTHIDRQ |
| gulae | 941891 | LAYSKADITNDQDVLSFKALWKNLDNDLERKSRLRSLILKHFSF |
| | 2 | LEGAAYGKKLFESKSSGNKSSKNKELTKKEKEELQANALSLDN |
| | (SEQ | LKSILFDFLQKLKDFRNYYSHYRHSGSSELPLFDGNMLQRLYNV |
| | ID No. | FDVSVQRVKRDHEHNDKVDPHRHFNHLVRKGKKDRYGHNDN |
| | 162) | PSFKHHFVDSEGMVTEAGLLFFVSLFLEKRDAIWMQKKIRGFK |
| | | GGTETYQQMTNEVFCRSRISLPKLKLESLRMDDWMLLDMLNE |
| | | LVRCPKPLYDRLREDDRACFRVPVDILPDEDDTDGGGEDPFKN |
| | | TLVRHQDRFPYFALRYFDLKKVFTSLRFHIDLGTYHFAIYKKMI |
| | | GEQPEDRHLTRNLYGFGRIQDFAEEHRPEEWKRLVRDLDYFET |
| | | GDKPYISQTSPHYHIEKGKIGLRFMPEGQHLWPSPEVGTTRTGR |
| | | SKYAQDKRLTAEAFLSVHELMPMMFYYFLLREKYSEEVSAEKV |
| | | QGRIKRVIEDVYAIYDAFARDEINTLKELDACLADKGIRRGHLP |
| | | KQMIAILSQEHKNMEEKVRKKLQEMIADTDHRLDMLDRQTDR |
| | | KIRIGRKNAGLPKSGVIADWLVRDMMRFQPVAKDASGKPLNNS |
| | | KANSTEYRMLQRALALFGGEKERLTPYFRQMNLTGGNNPHPFL |
| | | HDTRWESHTNILSFYRSYLRARKAFLERIGRSDRMENRPFLLLK |
| | | EPKTDRQTLVAGWKSEFHLPRGIFTEAVRDCLIEMGYDEVGSY |
| | | REVGFMAKAVPLYFERACEDRVQPFYDSPFNVGNSLKPKKGRF |
| | | LSKEERAEEWERGKERFRDLEAWSHSAARRIEDAFAGIEYASPG |
| | | NKKKIEQLLRDLSLWEAFESKLKVRADKINLAKLKKEILEAQEH |
| | | PYHDFKSWQKFERELRLVKNQDIITWMMCRDLMEENKVEGLD |
| | | TGTLYLKDIRTNVQEQGSLNVLNHVKPMRLPVVVYRADSRGH |
| | | VHKEEAPLATVYIEERDTKLLKQGNFKSFVKDRRLNGLFSFVDT |
| | | GGLAMEQYPISKLRVEYELAKYQTARVCAFEQTLELEESLLTRY |
| | | PHLPDKNFRKMLESWSDPLLAKWPELHGKVRLLIAVRNAFSHN |
| | | QYPMYDEAVFSSIRKYDPSSPDAIEERMGLNIAHRLSEEVKQAK |
| | | ETVERIIQA |
| Porphyromonas | WP_03 | MTEQSERPYNGTYYTLEDKHFWAAFLNLARHNAYITLTHIDRQ |
| gulae | 941979 | LAYSKADITNDQDVLSFKALWKNLDNDLERKSRLRSLILKHFSF |
| | 2 | LEGAAYGKKLFESKSSGNKSSKNKELTKKEKEELQANALSLDN |
| | (SEQ | LKSILFDFLQKLKDFRNYYSHYRHSGSSELPLFDGNMLQRLYNV |
| | ID No. | FDVSVQRVKRDHEHNDKVDPHRHFNHLVRKGKKDRYGHNDN |
| | 163) | PSFKHHFVDGEGMVTEAGLLFFVSLFLEKRDAIWMQKKIRGFK |
| | | GGTETYQQMTNEVFCRSRISLPKLKLESLRTDDWMLLDMLNEL |
| | | VRCPKPLYDRLREKDRARFRVPVDILPDEDDTDGGGEDPFKNT |
| | | LVRHQDRFPYFALRYFDLKKVFTSLRFHIDLGTYHFAIYKKVIG |
| | | EQPEDRHLTRNLYGFGRIQDFAEEHRPEEWKRLVRDLDYFETG |
| | | DKPYISQTTPHYHIEKGKIGLRFVPEGQHLWPSPEVGTTRTGRSK |
| | | YAQDKRLTAEAFLSVHELMPMMFYYFLLREKYSEEVSAEKVQ |
| | | GRIKRVIEDVYAIYDAFARDEINTRDELDACLADKGIRRGHLPK |
| | | QMIGILSQEHKNMEEKVRKKLQEMIADTDHRLDMLDRQTDRKI |
| | | RIGRKNAGLPKSGVIADWLVRDMMRFQPVAKDTSGKPLNNSK |
| | | ANSTEYRMLQRALALFGGEKERLTPYFRQMNLTGGNNPHPFLD |
| | | ETRWESHTNILSFYRSYLRARKAFLERIGRSDRVENRPFLLLKEP |
| | | KTDRQTLVAGWKSEFHLPRGIFTEAVRDCLIEMGYDEVGSYKE |
| | | VGFMAKAVPLYFERACKDRVQPFYDSPFNVGNSLKPKKGRFLS |
| | | KEKRAEEWESGKERFRLAKLKKEILEAQEHPYHDFKSWQKFER |
| | | ELRLVKNQDIITWMMCRDLMEENKVEGLDTGTLYLKDIRPNVQ |
| | | EQGSLNVLNRVKPMRLPVVVYRADSRGHVHKEEAPLATVYIEE |
| | | RDTKLLKQGNFKSFVKDRRLNGLFSFVDTGGLAMEQYPISKLR |
| | | VEYELAKYQTARVCVFELTLRLEESLLSRYPHLPDESFREMLES |
| | | WSDPLLAKWPELHGKVRLLIAVRNAFSHNQYPMYDEAVFSSIR |
| | | KYDPSSPDAIEERMGLNIAHRLSEEVKQAKETVERIIQA |
| Porphyromonas | WP_03 | MTEQSERPYNGTYYTLEDKHFWAAFLNLARHNAYITLTHIDRQ |
| gulae | 942617 | LAYSKADITNDQDVLSFKALWKNFDNDLERKSRLRSLILKHFSF |
| | 6 | LEGAAYGKKLFESKSSGNKSSKNKELTKKEKEELQANALSLDN |
| | (SEQ | LKSILFDFLQKLKDFRNYYSHYRHSGSSELPLFDGNMLQRLYNV |
| | ID No. | FDVSVQRVKRDHEHNDKVDPHYHFNHLVRKGKKDRYGHNDN |
| | 164) | PSFKHHFVDSEGMVTEAGLLFFVSLFLEKRDAIWMQKKIRGFK |
| | | GGTGPYEQMTNEVFCRSRISLPKLKLESLRTDDWMLLDMLNEL |
| | | VRCPKPLYDRLREKDRACFRVPVDILPDEDDTDGGGEDPFKNT |
| | | LVRHQDRFPYFALRYFDLKKVFTSLRFHIDLGTYHFAIYKKMIG |
| | | EQPEDRHLTRNLYGFGRIQDFAEEHRPEEWKRLVRDLDYFETG |
| | | DKPYISQTTPHYHIEKGKIGLRFMPEGQHLWPSPEVGTTRTGRS |
| | | KYAQDKRLTAEAFLSVHELMPMMFYYFLLREKYSEEVSAEKV |
| | | QGRIKRVIKDVYAIYDAFARDEINTLKELDACSADKGIRRGHLP |
| | | KQMIGILSQEHKNMEEKVRKKLQEMIADTDHRLDMLDRQTDR |
| | | KIRIGRKNAGLPKSGVIADWLVRDMMRFQPVAKDTSGKPLNNS |
| | | KANSTEYRMLQRALALFGGEKERLTPYFRQMNLTGGNNPHPFL |
| | | DETRWESHTNILSFYRSYLRARKAFLERIGRSDRVENRPFLLLKE |
| | | PKNDRQTLVAGWKSEFHLPRGIFTEAVRDCLIEMGYDEVGSYK |
| | | EVGFMAKAVPLYFERACKDRVQPFYDSPFNVGNSLKPKKGRFL |
| | | SKEKRAEEWESGKERFRLAKLKKEILEAKEHPYHDFKSWQKFE |
| | | RELRLVKNQDIITWMMCRDLMEENKVEGLDTGTLYLKDIRTDV |
| | | HEQGSLNVLNRVKPMRLPVVVYRADSRGHVHKEQAPLATVYI |
| | | EERDTKLLKQGNFKSFVKDRRLNGLFSFVDTGGLAMEQYPISK |
| | | LRVEYELAKYQTARVCAFEQTLELEESLLTRYPHLPDENFREML |
| | | ESWSDPLLGKWPDLHGKVRLLIAVRNAFSHNQYPMYDEAVFSS |
| | | IRKYDPSSPDAIEERMGLNIAHRLSEEVKQAKETVERIIQA |
| Porphyromonas | WP_03 | MTEQSERPYNGTYYTLEDKHFWAAFLNLARHNAYITLTHIDRQ |
| gulae | 943177 | LAYSKADITNDQDVLSFKALWKNFDNDLERKSRLRSLILKHFSF |
| | 8 | LEGAAYGKKLFESKSSGNKSSKNKELTKKEKEELQANALSLDN |
| | (SEQ | LKSILFDFLQKLKDFRNYYSHYRHSESSELPLFDGNMLQRLYNV |
| | ID No. | FDVSVQRVKRDHEHNDKVDPHRHFNHLVRKGKKDRYGHNDN |
| | 165) | PSFKHHFVDGEGMVTEAGLLFFVSLFLEKRDAIWMQKKIRGFK |
| | | GGTETYQQMTNEVFCRSRISLPKLKLESLRTDDWMLLDMLNEL |
| | | VRCPKPLYDRLREDDRACFRVPVDILPDEDDTDGGGEDPFKNT |
| | | LVRHQDRFPYFALRYFDLKKVFTSLRFHIDLGTYHFAIYKKMIG |
| | | EQPEDRHLTRNLYGFGRIQDFAEEHRPEEWKRLVRDLDYFETG |
| | | DKPYISQTSPHYHIEKGKIGLRFMPEGQHLWPSPEVGTTRTGRS |
| | | KYAQDKRLTAEAFLSVHELMPMMFYYFLLREKYSEEVSAEKV |
| | | QGRIKRVIEDVYAIYDAFARDEINTLKELDACLADKGIRRGHLP |
| | | KQMIAILSQEHKDMEEKIRKKLQEMIADTDHRLDMLDRQTDRK |
| | | IRIGRKNAGLPKSGVIADWLVRDMMRFQPVAKDTSGKPLNNSK |
| | | ANSTEYRMLQRALALFGGEKKRLTPYFRQMNLTGGNNPHPFLH |
| | | ETRWESHTNILSFYRSYLRARKAFLERIGRSDRMENRPFLLLKEP |
| | | KTDRQTLVAGWKSEFHLPRGIFTEAVRDCLIEMGYDEVGSYRE |
| | | VGFMAKAVPLYFERACEDRVQPFYDSPFNVGNSLKPKKGRFLS |
| | | KEERAEEWERGKERFRDLEAWSHSAARRIEDAFAGIEYASPGN |
| | | KKKIEQLLRDLSLWEAFESKLKVRADKINLAKLKKEILEAQEHP |
| | | YHDFKSWQKFERELRLVKNQDIITWMMCRDLMEENKVEGLDT |
| | | GTLYLKDIRPNVQEQGSLNVLNRVKPMRLPVVVYRADSRGHV |
| | | HKEEAPLATVYIEERDTKLLKQGNFKSFVKDRRLNGLFSFVDTG |
| | | GLAMEQYPISKLRVEYELAKYQTARVCVFELTLRLEESLLTRYP |
| | | HLPDESFRKMLESWSDPLLAKWPELHGKVRLLIAVRNAFSHNQ |
| | | YPMYDEAVFSSIRKYDPSSPDAIEERMGLNIAHRLSEEVKQAKE |
| | | TVERIIQV |
| Porphyromonas | WP_03 | MTEQSERPYNGTYYTLEDKHFWAAFLNLARHNAYITLTHIDRQ |
| gulae | 943719 | LAYSKADITNDEDILFFKGQWKNLDNDLERKSRLRSLILKHFSF |
| | 9 | LEGAAYGKKFFESKSSGNKSSKNKELTKKEKEELQANALSLDN |
| | (SEQ | LKSILFDFLQKLKDFRNYYSHYRHSGSSELPLFDGNMLQRLYNV |
| | ID No. | FDVSVQRVKRDHEHNDEVDPHYHFNHLVRKGKKDRYGHNDN |
| | 166) | PSFKHHFVDGEGMVTEAGLLFFVSLFLEKRDAIWMQKKIRGFK |
| | | GGTEPYEQMTNEVFCRSRISLPKLKLESLRTDDWMLLDMLNEL |
| | | VRCPKPLYDRLREKDRACFRVPVDILPDEDDTDGGGEDPFKNT |
| | | LVRHQDRFPYFALRYFDLKKVFTSLRFHIDLGTYHFAIYKKMIG |
| | | EQPEDRHLTRNLYGFGRIQDFAEEHRPEEWKRLVRDLDYFETG |
| | | DKPYISQTTPHYHIEKGKIGLRFVPEGQHLWPSPEVGTTRTGRSK |
| | | YAQDKRLTAEAFLSVHELMPMMFYYFLLREKYSEEVSAEKVQ |
| | | GRIKRVIEDVYAIYDAFARDEINTLKELDACLADKGIRRGHLPK |
| | | QMIGILSQERKDMEEKVRKKLQEMIADTDHRLDMLDRQTDRKI |
| | | RIGRKNAGLPKSGVIADWLVRDMMRFQPVAKDTSGKPLNNSK |
| | | ANSTEYRMLQRALALFGGEKERLTPYFRQMNLTGGNNPHPFLH |
| | | ETRWESHTNILSFYRSYLRARKAFLERIGRSDRVENCPFLLLKEP |
| | | KTDRQTLVAGWKGEFHLPRGIFTEAVRDCLIEMGYDEVGSYRE |
| | | VGFMAKAVPLYFERACEDRVQPFYDSPFNVGNSLKPKKGRFLS |
| | | KEKRAEEWESGKERFRLAKLKKEILEAQEHPYHDFKSWQKFER |
| | | ELRLVKNQDIITWMMCRDLMEENKVEGLDTGTLYLKDIRPNVQ |
| | | EQGSLNVLNRVKPMRLPVVVYRADSRGHVHKEEAPLATVYIEE |
| | | RDTKLLKQGNFKSFVKDRRLNGLFSFVDTGALAMEQYPISKLR |
| | | VEYELAKYQTARVCAFEQTLELEESLLTRYPHLPDESFREMLES |
| | | WSDPLLTKWPELHGKVRLLIAVRNAFSHNQYPMYDEAVFSSIW |
| | | KYDPSSPDAIEERMGLNIAHRLSEEVKQAKETIERIIQA |
| Porphyromonas | WP_03 | MTEQSERPYNGTYYTLEDKHFWAAFLNLARHNAYITLTHIDRQ |
| gulae | 944217 | LAYSKADITNDQDVLSFKALWKNLDNDLERKSRLRSLILKHFSF |
| | 1 | LEGAAYGKKLFESKSSGNKSSKNKELTKKEKEELQANALSLDN |
| | (SEQ | LKSILFDFLQKLKDFRNYYSHYRHSGSSELPLFDGNMLQRLYNV |
| | ID No. | FDVSVQRVKRDHEHNDKVDPHYHFNHLVRKGKKDRYGHNDN |
| | 167) | PSFKHHFVDSEGMVTEAGLLFFVSLFLEKRDAIWMQKKIRGFK |
| | | GGTGPYEQMTNEVFCRSRISLPKLKLESLRTDDWMLLDMLNEL |
| | | VRCPKPLYDRLREKDRACFRVPVDILPDEDDTDGGGEDPFKNT |
| | | LVRHQDRFPYFALRYFDLKKVFTSLRFHIDLGTYHFAIYKKMIG |
| | | EQPEDRHLTRNLYGFGRIQDFAEEHRPEEWKRLVRDLDYLETG |
| | | DKPYISQTTPHYHIEKGKIGLRFVPEGQHLWPSPEVGTTRTGRSK |
| | | CAQDKRLTAEAFLSVHELMPMMFYYFLLREKYSEEVSAEKVQ |
| | | GRIKRVIEDVYAIYDAFARDEINTLKELDTCLADKGIRRGHLPK |
| | | QMITILSQERKDMKEKIRKKLQEMIADTDHRLDMLDRQTDRKI |
| | | RIGRKNAGLPKSGVIADWLVRDMMRFQPVAKDASGKPLNNSK |
| | | ANSTEYRMLQRALALFGGEKERLTPYFRQMNLTGGNNPHPFLH |
| | | ETRWESHTNILSFYRSYLRARKAFLERIGRSDRVENCPFLLLKEP |
| | | KTDRQTLVAGWKDEFHLPRGIFTEAVRDCLIEMGYDEVGSYRE |
| | | VGFMAKAVPLYFERACEDRVQPFYDSPFNVGNSLKPKKGRFLS |
| | | KEDRAEEWERGMERFRDLEAWSHSAARRIKDAFAGIEYASPGN |
| | | KKKIEQLLRDLSLWEAFESKLKVRADKINLAKLKKEILEAQEHP |
| | | YHDFKSWQKFERELRLVKNQDIITWMMCRDLMEENKVEGLDT |
| | | GTLYLKDIRPNVQEQGSLNVLNRVKPMRLPVVVYRADSRGHV |
| | | HKEAPLATVYIEERNTKLLKQGNFKSFVKDRRLNGLFSFVDTG |
| | | GLAMEQYPISKLRVEYELAKYQTARVCVFELTLRLEESLLSRYP |
| | | HLPDESFREMLESWSDPLLAKWPELHGKVRLLIAVRNAFSHNQ |
| | | YPMYDEAVFSSIRKYDPSSPDAIEERMGLNIAHRLSEEVKQAKE |
| | | TVERIIQA |
| Porphyromonas | WP_03 | MNTVPATENKGQSRTVEDDPQYFGLYLNLARENLIEVESHVRI |
| gulae | 944505 | KFGKKKLNEESLKQSLLCDHLLSIDRWTKVYGHSRRYLPFLHCF |
| | 5 | DPDSGIEKDHDSKTGVDPDSAQRLIRELYSLLDFLRNDFSHNRL |
| | (SEQ | DGTTFEHLKVSPDISSFITGAYTFACERAQSRFADFFKPDDFLLA |
| | ID No. | KNRKEQLISVADGKECLTVSGFAFFICLFLDREQASGMLSRIRGF |
| | 168) | KRTDENWARAVHETFCDLCIRHPHDRLESSNTKEALLLDMLNE |
| | | LNRCPRILYDMLPEEERAQFLPALDENSMNNLSENSLNEESRLL |
| | | WDGSSDWAEALTKRIRHQDRFPYLMLRFIEEMDLLKGIRFRVD |
| | | LGEIELDSYSKKVGRNGEYDRTITDHALAFGKLSDFQNEEEVSR |
| | | MISGEASYPVRFSLFAPRYAIYDNKIGYCHTSDPVYPKSKTGEK |
| | | RALSNPQSMGFISVHDLRKLLLMELLCEGSFSRMQSDFLRKANR |
| | | ILDETAEGKLQFSALFPEMRHRFIPPQNPKSKDRREKAETTLEKY |
| | | KQEIKGRKDKLNSQLLSAFDMNQRQLPSRLLDEWMNIRPASHS |
| | | VKLRTYVKQLNEDCRLRLRKFRKDGDGKARAIPLVGEMATFLS |
| | | QDIVRMIISEETKKLITSAYYNEMQRSLAQYAGEENRRQFRAIV |
| | | AELHLLDPSSGHPFLSATMETAHRYTEDFYKCYLEKKREWLAK |
| | | TFYRPEQDENTKRRISVFFVPDGEARKLLPLLIRRRMKEQNDLQ |
| | | DWIRNKQAHPIDLPSHLFDSKIMELLKVKDGKKKWNEAFKDW |
| | | WSTKYPDGMQPFYGLRRELNIHGKSVSYIPSDGKKFADCYTHL |
| | | MEKTVRDKKRELRTAGKPVPPDLAAYIKRSFHRAVNEREFMLR |
| | | LVQEDDRLMLMAINKMMTDREEDILPGLKNIDSILDEENQFSLA |
| | | VHAKVLEKEGEGGDNSLSLVPATIEIKSKRKDWSKYIRYRYDR |
| | | RVPGLMSHFPEHKATLDEVKTLLGEYDRCRIKIFDWAFALEGAI |
| | | MSDRDLKPYLHESSSREGKSGEHSTLVKMLVEKKGCLTPDESQ |
| | | YLILIRNKAAHNQFPCAAEMPLIYRDVSAKVGSIEGSSAKDLPE |
| | | GSSLVDSLWKKYEMIIRKILPILDHENRFFGKLLNNMSQPINDL |
| Capnocytophaga | WP_04 | MENKTSLGNNIYYNPFKPQDKSYFAGYLNAAMENIDSVFRELG |
| cynodegmi | 198958 | KRLKGKEYTSENFFDAIFKENISLVEYERYVKLLSDYFPMARLL |
| | 1 | DKKEVPIKERKENFKKNFRGIIKAVRDLRNFYTHKEHGEVEITD |
| | (SEQ | EIFGVLDEMLKSTVLTVKKKKIKTDKTKEILKKSIEKQLDILCQK |
| | ID No. | KLEYLKDTARKIEEKRRNQRERGEKKLVPRFEYSDRRDDLIAAI |
| | 169) | YNDAFDVYIDKKKDSLKESSKTKYNTESYPQQEEGDLKIPISKN |
| | | GVVFLLSLFLSKQEVHAFKSKIAGFKATVIDEATVSHRKNSICF |
| | | MATHEIFSHLAYKKLKRKVRTAEINYSEAENAEQLSIYAKETLM |
| | | MQMLDELSKVPDVVYQNLSEDVQKTFIEDWNEYLKENNGDVG |
| | | TMEEEQVIHPVIRKRYEDKFNYFAIRFLDEFAQFPTLRFQVHLG |
| | | NYLHDSRPKEHLISDRRIKEKITVFGRLSELEHKKALFIKNTETN |
| | | EDRKHYWEVFPNPNYDFPKENISVNDKDFPIAGSILDREKQPTA |
| | | GKIGIKVNLLNQKYISEVDKAVKAHQLKQRNNKPSIQNIIEEIVPI |
| | | NGSNPKEIIVFGGQPTAYLSMNDIHSILYEFFDKWEKKKEKLEK |
| | | KGEKELRKEIGKELEEKIVGKIQTQIQQIIDKDINAKILKPYQDDD |
| | | STAIDKEKLIKDLKQEQKILQKLKNEQTAREKEYQECIAYQEES |
| | | RKIKRSDKSRQKYLRNQLKRKYPEVPTRKEILYYQEKGKVAVW |
| | | LANDIKRFMPTDFKNEWKGEQHSLLQKSLAYYEQCKEELKNLL |
| | | PQQKVFKHLPFELGGHFQQKYLYQFYTRYLDKRLEHISGLVQQ |
| | | AENFKNENKVFKKVENECFKFLKKQNYTHKGLDAQAQSVLGY |
| | | PIFLERGFMDEKPTIIKGKTFKGNESLFTDWFRYYKEYQNFQTF |
| | | YDTENYPLVELEKKQADRKRETKIYQQKKNDVFTLLMAKHIFK |
| | | SVFKQDSIDRFSLEDLYQSREERLENQEKAKQTGERNTNYIWNK |
| | | TVDLNLCDGKVTVENVKLKNVGNFIKYEYDQRVQTFLKYEENI |
| | | KWQAFLIKESKEEENYPYIVEREIEQYEKVRREELLKEVHLIEEY |
| | | ILEKVKDKEILKKGDNQNFKYYILNGLLKQLKNEDVESYKVFN |
| | | LNTKPEDVNINQLKQEATDLEQKAFVLTYIRNKFAHNQLPKKEF |
| | | WDYCQEKYGKIEKEKTYAEYFAEVFKREKEALMK |
| Prevotella | WP_04 | MNIPALVENQKKYFGTYSVMAMLNAQTVLDHIQKVADIEGEQ |
| sp. P5-119 | 251816 | NENNENLWFHPVMSHLYNAKNGYDKQPEKTMFIIERLQSYFPF |
| | 9 | LKIMAENQREYSNGKYKQNRVEVNSNDIFEVLKRAFGVLKMY |
| | (SEQ | RDLTNHYKTYEEKLIDGCEFLTSTEQPLSGMISKYYTVALRNTK |
| | ID No. | ERYGYKTEDLAFIQDNIKKITKDAYGKRKSQVNTGFFLSLQDYN |
| | 170) | GDTQKKLHLSGVGIALLICLFLDKQYINIFLSRLPIFSSYNAQSEE |
| | | RRIIIRSFGINSIKLPKDRIHSEKSNKSVAMDMLNEVKRCPDELFT |
| | | TLSAEKQSRFRIISDDHNEVLMKRSTDRFVPLLLQYIDYGKLFD |
| | | HIRFHVNMGKLRYLLKADKTCIDGQTRVRVIEQPLNGFGRLEE |
| | | AETMRKQENGTFGNSGIRIRDFENVKRDDANPANYPYIVDTYT |
| | | HYILENNKVEMFISDKGSSAPLLPLIEDDRYVVKTIPSCRMSTLEI |
| | | PAMAFHMFLFGSKKTEKLIVDVHNRYKRLFQAMQKEEVTAENI |
| | | ASFGIAESDLPQKILDLISGNAHGKDVDAFIRLTVDDMLTDTER |
| | | RIKRFKDDRKSIRSADNKMGKRGFKQISTGKLADFLAKDIVLFQ |
| | | PSVNDGENKITGLNYRIMQSAIAVYDSGDDYEAKQQFKLMFEK |
| | | ARLIGKGTTEPHPFLYKVFARSIPANAVDFYERYLIERKFYLTGL |
| | | CNEIKRGNRVDVPFIRRDQNKWKTPAMKTLGRIYSEDLPVELPR |
| | | QMFDNEIKSHLKSLPQMEGIDFNNANVTYLIAEYMKRVLNDDF |
| | | QTFYQWKRNYHYMDMLKGEYDRKGSLQHCFTSVEEREGLWK |
| | | ERASRTERYRKLASNKIRSNRQMRNASSEEIETILDKRLSNCRNE |
| | | YQKSEKVIRRYRVQDALLFLLAKKTLTELADFDGERFKLKEIMP |
| | | DAEKGILSEIMPMSFTFEKGGKKYTITSEGMKLKNYGDFFVLAS |
| | | DKRIGNLLELVGSDIVSKEDIMEEFNKYDQCRPEISSIVFNLEKW |
| | | AFDTYPELSARVDREEKVDFKSILKILLNNKNINKEQSDILRKIR |
| | | NAFDHNNYPDKGIVEIKALPEIAMSIKKAFGEYAIMK |
| Prevotella | WP_04 | MNIPALVENQKKYFGTYSVMAMLNAQTVLDHIQKVADIEGEQ |
| sp. P4-76 | 407214 | NENNENLWFHPVMSHLYNAKNGYDKQPEKTMFIIERLQSYFPF |
| | 7 | LKIMAENQREYSNGKYKQNRVEVNSNDIFEVLKRAFGVLKMY |
| | (SEQ | RDQASHYKTYDEKLIDGCEFLTSTEQPLSGMINNYYTVALRNM |
| | ID No. | NERYGYKTEDLAFIQDKRFKFVKDAYGKKKSQVNTGFFLSLQD |
| | 171) | YNGDTQKKLHLSGVGIALLICLFLDKQYINIFLSRLPIFSSYNAQS |
| | | EERRIIIRSFGINSIKQPKDRIHSEKSNKSVAMDMLNEIKRCPNEL |
| | | FETLSAEKQSRFRIISNDHNEVLMKRSSDRFVPLLLQYIDYGKLF |
| | | DHIRFHVNMGKLRYLLKADKTCIDGQTRVRVIEQPLNGFGRLE |
| | | EVETMRKQENGTFGNSGIRIRDFENMKRDDANPANYPYIVDTY |
| | | THYILENNKVEMFISDEETPAPLLPVIEDDRYVVKTIPSCRMSTL |
| | | EIPAMAFHMFLFGSKKTEKLIVDVHNRYKRLFKAMQKEEVTAE |
| | | NIASFGIAESDLPQKIIDLISGNAHGKDVDAFIRLTVDDMLADTE |
| | | RRIKRFKDDRKSIRSADNKMGKRGFKQISTGKLADFLAKDIVLF |
| | | QPSVNDGENKITGLNYRIMQSAIAVYNSGDDYEAKQQFKLMFE |
| | | KARLIGKGTTEPHPFLYKVFVRSIPANAVDFYERYLIERKFYLIG |
| | | LSNEIKKGNRVDVPFIRRDQNKWKTPAMKTLGRIYDEDLPVELP |
| | | RQMFDNEIKSHLKSLPQMEGIDFNNANVTYLIAEYMKRVLNDD |
| | | FQTFYQWKRNYRYMDMLRGEYDRKGSLQSCFTSVEEREGLWK |
| | | ERASRTERYRKLASNKIRSNRQMRNASSEEIETILDKRLSNSRNE |
| | | YQKSEKVIRRYRVQDALLFLLAKKTLTELADFDGERFKLKEIMP |
| | | DAEKGILSEIMPMSFTFEKGGKKYTITSEGMKLKNYGDFFVLAS |
| | | DKRIGNLLELVGSDTVSKEDIMEEFKKYDQCRPEISSIVFNLEKW |
| | | AFDTYPELSARVDREEKVDFKSILKILLNNKNINKEQSDILRKIR |
| | | NAFDHNNYPDKGVVEIRALPEIAMSIKKAFGEYAIMK |
| Prevotella | WP_04 | MNIPALVENQKKYFGTYSVMAMLNAQTVLDHIQKVADIEGEQ |
| sp. P5-60 | 407478 | NENNENLWFHPVMSHLYNAKNGYDKQPEKTMFIIERLQSYFPF |
| | 0 | LKIMAENQREYSNGKYKQNRVEVNSNDIFEVLKRAFGVLKMY |
| | (SEQ | RDLTNHYKTYEEKLIDGCEFLTSTEQPFSGMISKYYTVALRNTK |
| | ID No. | ERYGYKAEDLAFIQDNRYKFTKDAYGKRKSQVNTGSFLSLQDY |
| | 172) | NGDTTKKLHLSGVGIALLICLFLDKQYINLFLSRLPIFSSYNAQSE |
| | | ERRIIIRSFGINSIKQPKDRIHSEKSNKSVAMDMLNEVKRCPDELF |
| | | TTLSAEKQSRFRIISDDHNEVLMKRSSDRFVPLLLQYIDYGKLFD |
| | | HIRFHVNMGKLRYLLKADKTCIDGQTRVRVIEQPLNGFGRLEE |
| | | VETMRKQENGTFGNSGIRIRDFENMKRDDANPANYPYIVETYT |
| | | HYILENNKVEMFISDEENPTPLLPVIEDDRYVVKTIPSCRMSTLEI |
| | | PAMAFHMFLFGSEKTEKLIIDVHDRYKRLFQAMQKEEVTAENI |
| | | ASFGIAESDLPQKIMDLISGNAHGKDVDAFIRLTVDDMLTDTER |
| | | RIKRFKDDRKSIRSADNKMGKRGFKQISTGKLADFLAKDIVLFQ |
| | | PSVNDGENKITGLNYRIMQSAIAVYDSGDDYEAKQQFKLMFEK |
| | | ARLIGKGTTEPHPFLYKVFVRSIPANAVDFYERYLIERKFYLIGL |
| | | SNEIKKGNRVDVPFIRRDQNKWKTPAMKTLGRIYSEDLPVELPR |
| | | QMFDNEIKSHLKSLPQMEGIDFNNANVTYLIAEYMKRVLNDDF |
| | | QTFYQWKRNYRYMDMLRGEYDRKGSLQHCFTSIEEREGLWKE |
| | | RASRTERYRKLASNKIRSNRQMRNASSEEIETILDKRLSNCRNE |
| | | YQKSEKIIRRYRVQDALLFLLAKKTLTELADFDGERFKLKEIMP |
| | | DAEKGILSEIMPMSFTFEKGGKIYTITSGGMKLKNYGDFFVLAS |
| | | DKRIGNLLELVGSNTVSKEDIMEEFKKYDQCRPEISSIVFNLEKW |
| | | AFDTYPELPARVDRKEKVDFWSILDVLSNNKDINNEQSYILRKI |
| | | RNAFDHNNYPDKGIVEIKALPEIAMSIKKAFGEYAIMK |
| Phaeodactylibacter | WP_04 | MTNTPKRRTLHRHPSYFGAFLNIARHNAFMIMEHLSTKYDMED |
| xiamenensis | 421823 | KNTLDEAQLPNAKLFGCLKKRYGKPDVTEGVSRDLRRYFPFLN |
| | 9 | YPLFLHLEKQQNAEQAATYDINPEDIEFTLKGFFRLLNQMRNNY |
| | (SEQ | SHYISNTDYGKFDKLPVQDIYEAAIFRLLDRGKHTKRFDVFESK |
| | ID No. | HTRHLESNNSEYRPRSLANSPDHENTVAFVTCLFLERKYAFPFL |
| | 173) | SRLDCFRSTNDAAEGDPLIRKASHECYTMFCCRLPQPKLESSDIL |
| | | LDMVNELGRCPSALYNLLSEEDQARFHIKREEITGFEEDPDEELE |
| | | QEIVLKRHSDRFPYFALRYFDDTEAFQTLRFDVYLGRWRTKPV |
| | | YKKRIYGQERDRVLTQSIRTFTRLSRLLPIYENVKHDAVRQNEE |
| | | DGKLVNPDVTSQFHKSWIQIESDDRAFLSDRIEHFSPHYNFGDQ |
| | | VIGLKFINPDRYAAIQNVFPKLPGEEKKDKDAKLVNETADAIIST |
| | | HEIRSLFLYHYLSKKPISAGDERRFIQVDTETFIKQYIDTIKLFFED |
| | | IKSGELQPIADPPNYQKNEPLPYVRGDKEKTQEERAQYRERQKE |
| | | IKERRKELNTLLQNRYGLSIQYIPSRLREYLLGYKKVPYEKLAL |
| | | QKLRAQRKEVKKRIKDIEKMRTPRVGEQATWLAEDIVFLTPPK |
| | | MHTPERKTTKHPQKLNNDQFRIMQSSLAYFSVNKKAIKKFFQK |
| | | ETGIGLSNRETSHPFLYRIDVGRCRGILDFYTGYLKYKMDWLDD |
| | | AIKKVDNRKHGKKEAKKYEKYLPSSIQHKTPLELDYTRLPVYLP |
| | | RGLFKKAIVKALAAHADFQVEPEEDNVIFCLDQLLDGDTQDFY |
| | | NWQRYYRSALTEKETDNQLVLAHPYAEQILGTIKTLEGKQKNN |
| | | KLGNKAKQKIKDELIDLKRAKRRLLDREQYLRAVQAEDRALW |
| | | LMIQERQKQKAEHEEIAFDQLDLKNITKILTESIDARLRIPDTKV |
| | | DITDKLPLRRYGDLRRVAKDRRLVNLASYYHVAGLSEIPYDLV |
| | | KKELEEYDRRRVAFFEHVYQFEKEVYDRYAAELRNENPKGEST |
| | | YFSHWEYVAVAVKHSADTHFNELFKEKVMQLRNKFHHNEFPY |
| | | FDWLLPEVEKASAALYADRVFDVAEGYYQKMRKLMRQ |
| Flavobacterium | WP_04 | MDNNITVEKTELGLGITYNHDKVEDKHYFGGFFNLAQNNIDLV |
| sp. 316 | 596837 | AQEFKKRLLIQGKDSINIFANYFSDQCSITNLERGIKILAEYFPVV |
| | 7 | SYIDLDEKNKSKSIREHLILLLETINNLRNYYTHYYHKKIIIDGSL |
| | (SEQ | FPLLDTILLKVVLEIKKKKLKEDKTKQLLKKGLEKEMTILFNLM |
| | ID No. | KAEQKEKKIKGWNIDENIKGAVLNRAFSHLLYNDELSDYRKSK |
| | 174) | YNTEDETLKDTLTESGILFLLSFFLNKKEQEQLKANIKGYKGKIA |
| | | SIPDEEITLKNNSLRNMATHWTYSHLTYKGLKHRIKTDHEKETL |
| | | LVNMVDYLSKVPHEIYQNLSEQNKSLFLEDINEYMRDNEENHD |
| | | SSEASRVIHPVIRKRYENKFAYFAIRFLDEFAEFPTLRFMVNVGN |
| | | YIHDNRKKDIGGTSLITNRTIKQQINVFGNLTEIHKKKNDYFEKE |
| | | ENKEKTLEWELFPNPSYHFQKENIPIFIDLEKSKETNDLAKEYAK |
| | | EKKKIFGSSRKKQQNTAKKNRETIINLVFDKYKTSDRKTVTFEQ |
| | | PTALLSFNELNSFLYAFLVENKTGKELEKIIIEKIANQYQILKNCS |
| | | STVDKTNDNIPKSIKKIVNTTTDSFYFEGKKIDIEKLEKDITIEIEK |
| | | TNEKLETIKENEESAQNYKRNERNTQKRKLYRKYVFFTNEIGIE |
| | | ATWITNDILRFLDNKENWKGYQHSELQKFISQYDNYKKEALGL |
| | | LESEWNLESDAFFGQNLKRMFQSNSTFETFYKKYLDNRKNTLE |
| | | TYLSAIENLKTMTDVRPKVLKKKWTELFRFFDKKIYLLSTIETKI |
| | | NELITKPINLSRGIFEEKPTFINGKNPNKENNQHLFANWFIYAKK |
| | | QTILQDFYNLPLEQPKAITNLKKHKYKLERSINNLKIEDIYIKQM |
| | | VDFLYQKLFEQSFIGSLQDLYTSKEKREIEKGKAKNEQTPDESFI |
| | | WKKQVEINTHNGRIIAKTKIKDIGKFKNLLTDNKIAHLISYDDRI |
| | | WDFSLNNDGDITKKLYSINTELESYETIRREKLLKQIQQFEQFLL |
| | | EQETEYSAERKHPEKFEKDCNPNFKKYIIEGVLNKIIPNHEIEEIEI |
| | | LKSKEDVFKINFSDILILNNDNIKKGYLLIMIRNKFAHNQLIDKN |
| | | LFNFSLQLYSKNENENFSEYLNKVCQNIIQEFKEKLK |
| Porphyromonas | WP_04 | MTEQSERPYNGTYYTLEDKHFWAAFLNLARHNAYITLTHIDRQ |
| gulae | 620101 | LAYSKADITNDQDVLSFKALWKNFDNDLERKSRLRSLILKHFSF |
| | 8 | LEGAAYGKKLFESKSSGNKSSKNKELTKKEKEELQANALSLDN |
| | (SEQ | LKSILFDFLQKLKDFRNYYSHYRHSESSELPLFDGNMLQRLYNV |
| | ID No. | FDVSVQRVKRDHEHNDKVDPHRHFNHLVRKGKKDRYGHNDN |
| | 175) | PSFKHHFVDSEGMVTEAGLLFFVSLFLEKRDAIWMQKKIRGFK |
| | | GGTETYQQMTNEVFCRSRISLPKLKLESLRTDDWMLLDMLNEL |
| | | VRCPKPLYDRLREKDRARFRVPVDILPDEDDTDGGGEDPFKNT |
| | | LVRHQDRFPYFALRYFDLKKVFTSLRFHIDLGTYHFAIYKKMIG |
| | | EQPEDRHLTRNLYGFGRIQDFAEEHRPEEWKRLVRDLDYFETG |
| | | DKPYISQTTPHYHIEKGKIGLRFMPEGQHLWPSPEVGTTRTGRS |
| | | KYAQDKRLTAEAFLSVHELMPMMFYYFLLREKYSEEVSAEKV |
| | | QGRIKRVIEDVYAIYDAFARDEINTLKELDACLADKGIRRGHLP |
| | | KQMIAILSQEHKDMEEKIRKKLQEMIADTDHRLDMLDRQTDRK |
| | | IRIGRKNAGLPKSGVIADWLVRDMMRFQPVAKDTSGKPLNNSK |
| | | ANSTEYRMLQRALALFGGEKKRLTPYFRQMNLTGGNNPHPFLH |
| | | ETRWESHTNILSFYRSYLRARKAFLERIGRSDRMENRPFLLLKEP |
| | | KTDRQTLVAGWKSEFHLPRGIFTEAVRDCLIEMGYDEVGSYRE |
| | | VGFMAKAVPLYFERACEDRVQPFYDSPFNVGNSLKPKKGRFLS |
| | | KEERAEEWERGKERFRDLEAWSHSAARRIEDAFAGIEYASPGN |
| | | KKKIEQLLRDLSLWEAFESKLKVRADKINLAKLKKEILEAQEHP |
| | | YHDFKSWQKFERELRLVKNQDIITWMMCRDLMEENKVEGLDT |
| | | GTLYLKDIRPNVQEQGSLNVLNRVKPMRLPVVVYRADSRGHV |
| | | HKEEAPLATVYIEERDTKLLKQGNFKSFVKDRRLNGLFSFVDTG |
| | | GLAMEQYPISKLRVEYELAKYQTARVCVFELTLRLEESLLTRYP |
| | | HLPDESFRKMLESWSDPLLAKWPELHGKVRLLIAVRNAFSHNQ |
| | | YPMYDEAVFSSIRKYDPSSPDAIEERMGLNIAHRLSEEVKQAKE |
| | | TVERIIQV |
| WP_04743 | Chryseo- | METQTIGHGIAYDHSKIQDKHFFGGFLNLAENNIKAVLKAFSEK |
| 1796 | bacterium | FNVGNVDVKQFADVSLKDNLPDNDFQKRVSFLKMYFPVVDFIN |
| | sp. | IPNNRAKFRSDLTTLFKSVDQLRNFYTHYYHKPLDFDASLFILLD |
| | YR477 | DIFARTAKEVRDQKMKDDKTRQLLSKSLSEELQKGYELQLERL |
| | (SEQ | KELNRLGKKVNIHDQLGIKNGVLNNAFNHLIYKDGESFKTKLT |
| | ID No. | YSSALTSFESAENGIEISQSGLLFLLSMFLKRKEIEDLKNRNKGF |
| | 176) | KAKVVIDEDGKVNGLKFMATHWVFSYLCFKGLKSKLSTEFHEE |
| | | TLLIQIIDELSKVPDELYCAFDKETRDKFIEDINEYVKEGHQDFSL |
| | | EDAKVIHPVIRKRYENKFNYFAIRFLDEFVKFPSLRFQVHVGNY |
| | | VHDRRIKNIDGTTFETERVVKDRIKVFGRLSETSSYKAQYLSSVS |
| | | DKHDETGWEIFPNPSYVFINNNIPIHISVDTSFKKEIADFKKLRRA |
| | | QVPDELKIRGAEKKRKFEITQMIGSKSVLNQEEPIALLSLNEIPAL |
| | | LYEILINGKEPAEIERIIKDKLNERQDVIKNYNPENWLPASQISRR |
| | | LRSNKGERIINTDKLLQLVTKELLVTEQKLKIISDNREALKQKKE |
| | | GKYIRKFIFTNSELGREAIWLADDIKRFMPADVRKEWKGYQHS |
| | | QLQQSLAFYNSRPKEALAILESSWNLKDEKIIWNEWILKSFTQN |
| | | KFFDAFYNEYLKGRKKYFAFLSEHIVQYTSNAKNLQKFIKQQM |
| | | PKDLFEKRHYIIEDLQTEKNKILSKPFIFPRGIFDKKPTFIKGVKV |
| | | EDSPESFANWYQYGYQKDHQFQKFYDWKRDYSDVFLEHLGKP |
| | | FINNGDRRTLGMEELKERIIIKQDLKIKKIKIQDLFLRLIAENLFQ |
| | | KVFKYSAKLPLSDFYLTQEERMEKENMAALQNVREEGDKSPNI |
| | | IKDNFIWSKMIPYKKGQIIENAVKLKDIGKLNVLSLDDKVQTLL |
| | | SYDDAKPWSKIALENEFSIGENSYEVIRREKLFKEIQQFESEILFR |
| | | SGWDGINHPAQLEDNRNPKFKMYIVNGILRKSAGLYSQGEDIW |
| | | FEYNADFNNLDADVLETKSELVQLAFLVTAIRNKFAHNQLPAK |
| | | EFYFYIRAKYGFADEPSVALVYLNFTKYAINEFKKVMI |
| Riemerella | WP_04 | MFFSFHNAQRVIFKHLYKAFDASLRMVKEDYKAHFTVNLTRDF |
| anatipestifer | 935426 | AHLNRKGKNKQDNPDFNRYRFEKDGFFTESGLLFFTNLFLDKR |
| | 3 | DAYWMLKKVSGFKASHKQREKMTTEVFCRSRILLPKLRLESRY |
| | (SEQ | DHNQMLLDMLSELSRCPKLLYEKLSEENKKHFQVEADGFLDEI |
| | ID No. | EEEQNPFKDTLIRHQDRFPYFALRYLDLNESFKSIRFQVDLGTYH |
| | 177) | YCIYDKKIGDEQEKRHLTRTLLSFGRLQDFTEINRPQEWKALTK |
| | | DLDYKETSNQPFISKTTPHYHITDNKIGFRLGTSKELYPSLEIKDG |
| | | ANRIAKYPYNSGFVAHAFISVHELLPLMFYQHLTGKSEDLLKET |
| | | VRHIQRIYKDFEEERINTIEDLEKANQGRLPLGAFPKQMLGLLQ |
| | | NKQPDLSEKAKIKIEKLIAETKLLSHRLNTKLKSSPKLGKRREKL |
| | | IKTGVLADWLVKDFMRFQPVAYDAQNQPIKSSKANSTEFWFIR |
| | | RALALYGGEKNRLEGYFKQTNLIGNTNPHPFLNKFNWKACRNL |
| | | VDFYQQYLEQREKFLEAIKNQPWEPYQYCLLLKIPKENRKNLV |
| | | KGWEQGGISLPRGLFTEAIRETLSEDLMLSKPIRKEIKKHGRVGF |
| | | ISRAITLYFKEKYQDKHQSFYNLSYKLEAKAPLLKREEHYEYW |
| | | QQNKPQSPTESQRLELHTSDRWKDYLLYKRWQHLEKKLRLYR |
| | | NQDVMLWLMTLELTKNHFKELNLNYHQLKLENLAVNVQEAD |
| | | AKLNPLNQTLPMVLPVKVYPATAFGEVQYHKTPIRTVYIREEHT |
| | | KALKMGNFKALVKDRRLNGLFSFIKEENDTQKHPISQLRLRREL |
| | | EIYQSLRVDAFKETLSLEEKLLNKHTSLSSLENEFRALLEEWKK |
| | | EYAASSMVTDEHIAFIASVRNAFCHNQYPFYKEALHAPIPLFTV |
| | | AQPTTEEKDGLGIAEALLKVLREYCEIVKSQI |
| Porphyromonas | WP_05 | MTEQNEKPYNGTYYTLEDKHFWAAFFNLARHNAYITLAHIDRQ |
| gingivalis | 291231 | LAYSKADITNDEDILFFKGQWKNLDNDLERKARLRSLILKHFSF |
| | 2 | LEGAAYGKKLFESQSSGNKSSKKKELTKKEKEELQANALSLDN |
| | (SEQ | LKSILFDFLQKLKDFRNYYSHYRHPESSELPLFDGNMLQRLYNV |
| | ID No. | FDVSVQRVKRDHEHNDKVDPHRHFNHLVRKGKKDKYGNNDN |
| | 178) | PFFKHHFVDREEKVTEAGLLFFVSLFLEKRDAIWMQKKIRGFKG |
| | | GTEAYQQMTNEVFCRSRISLPKLKLESLRTDDWMLLDMLNELV |
| | | RCPKLLYDRLREEDRARFRVPVDILSDEDDTDGTEEDPFKNTLV |
| | | RHQDRFPYFALRYFDLKKVFTSLRFHIDLGTYHFAIYKKNIGEQ |
| | | PEDRHLTRNLYGFGRIQDFAEEHRPEEWKRLVRDLDYFETGDK |
| | | PYITQTTPHYHIEKGKIGLRFVPEGQLLWPSPEVGATRTGRSKY |
| | | AQDKRFTAEAFLSVHELMPMMFYYFLLREKYSEEASAEKVQG |
| | | RIKRVIEDVYAVYDAFARDEINTRDELDACLADKGIRRGHLPRQ |
| | | MIAILSQEHKDMEEKVRKKLQEMIADTDHRLDMLDRQTDRKIR |
| | | IGRKNAGLPKSGVIADWLVRDMMRFQPVAKDTSGKPLNNSKA |
| | | NSTEYRMLQRALALFGGEKERLTPYFRQMNLTGGNNPHPFLHE |
| | | TRWESHTNILSFYRSYLKARKAFLQSIGRSDREENHRFLLLKEPK |
| | | TDRQTLVAGWKSEFHLPRGIFTEAVRDCLIEMGYDEVGSYKEV |
| | | GFMAKAVPLYFERACKDRVQPFYDYPFNVGNSLKPKKGRFLSK |
| | | EKRAEEWESGKERFRDLEAWSHSAARRIEDAFVGIEYASWENK |
| | | KKIEQLLQDLSLWETFESKLKVKADKINIAKLKKEILEAKEHPY |
| | | HDFKSWQKFERELRLVKNQDIITWMMCRDLMEENKVEGLDTG |
| | | TLYLKDIRTDVQEQGSLNVLNHVKPMRLPVVVYRADSRGHVH |
| | | KEEAPLATVYIEERDTKLLKQGNFKSFVKDRRLNGLFSFVDTGA |
| | | LAMEQYPISKLRVEYELAKYQTARVCAFEQTLELEESLLTRYPH |
| | | LPDESFREMLESWSDPLLDKWPDLQREVRLLIAVRNAFSHNQY |
| | | PMYDETIFSSIRKYDPSSLDAIEERMGLNIAHRLSEEVKLAKEMV |
| | | ERIIQA |
| Porphyromonas | WP_05 | MTEQNEKPYNGTYYTLKDKHFWAAFFNLARHNAYITLTHIDRQ |
| gingivalis | 801925 | LAYSKADITNDEDILFFKGQWKNLDNDLERKARLRSLILKHFSF |
| | 0 | LEGAAYGKKLFESQSSGNKSSKKKELTKKEKEELQANALSLDN |
| | (SEQ | LKSILFDFLQKLKDFRNYYSHYRHPESSELPMFDGNMLQRLYN |
| | ID No. | VFDVSVQRVKRDHEHNDKVDPHRHFNHLVRKGKKDRCGNND |
| | 179) | NPFFKHHFVDREGKVTEAGLLFFVSLFLEKRDAIWMQKKIRGF |
| | | KGGTETYQQMTNEVFCRSRISLPKLKLESLRTDDWMLLDMLNE |
| | | LVRCPKSLYDRLREEDRACFRVPVDILSDEDDTDGAEEDPFKNT |
| | | LVRHQDRFPYFALRYFDLKKVFTSLRFHIDLGTYHFAIYKKNIG |
| | | EQPEDRHLTRNLYGFGRIQDFAEEHRPEEWKRLVRDLDCFETG |
| | | DKPYITQTTPHYHIEKGKIGLRFVPEGQHLWPSPEVGATRTGRS |
| | | KYAQDKRFTAEAFLSVHELMPMMFYYFLLREKYSEEVSAERV |
| | | QGRIKRVIEDVYAVYDAFARDEINTRDELDACLADKGIRRGHLP |
| | | RQMIAILSQKHKDMEEKVRKKLQEMIADTDHRLDMLDRQTDR |
| | | KIRIGRKNAGLPKSGVIADWLVRDMMRFQPVAKDTSGKPLNNS |
| | | KANSTEYRMLQRALALFGGEKERLTPYFRQMNLTGGNNPHPFL |
| | | HETRWESHTNILSFYRSYLKARKAFLQSIGRSDRVENHRFLLLK |
| | | EPKTDRQTLVAGWKGEFHLPRGIFTEAVRDCLIEMGLDEVGSY |
| | | KEVGFMAKAVPLYFERACKDRVQPFYDYPFNVGNSLKPKKGR |
| | | FLSKEKRAEEWESGKERFRDLEAWSHSAARRIEDAFAGIENASR |
| | | ENKKKIEQLLQDLSLWETFESKLKVKADKINIAKLKKEILEAKE |
| | | HPYLDFKSWQKFERELRLVKNQDIITWMMCRDLMEENKVEGL |
| | | DTGTLYLKDIRTDVQEQGSLNVLNHVKPMRLPVVVYRADSRG |
| | | HVHKEQAPLATVYIEERDTKLLKQGNFKSFVKDRRLNGLFSFV |
| | | DTGALAMEQYPISKLRVEYELAKYQTARVCAFEQTLELEESLLT |
| | | RYPHLPDENFRKMLESWSDPLLDKWPDLHRKVRLLIAVRNAFS |
| | | HNQYPMYDEAVFSSIRKYDPSSPDAIEERMGLNIAHRLSEEVKQ |
| | | AKEMAERIIQA |
| Flavobacterium | WP_06 | MSSKNESYNKQKTFNHYKQEDKYFFGGFLNNADDNLRQVGKE |
| columnare | 038185 | FKTRINFNHNNNELASVFKDYFNKEKSVAKREHALNLLSNYFP |
| | 5 | VLERIQKHTNHNFEQTREIFELLLDTIKKLRDYYTHHYHKPITIN |
| | (SEQ | PKVYDFLDDTLLDVLITIKKKKVKNDTSRELLKEKFRPELTQLK |
| | ID No. | NQKREELIKKGKKLLEENLENAVFNHCLRPFLEENKTDDKQNK |
| | 180) | TVSLRKYRKSKPNEETSITLTQSGLVFLISFFLHRKEFQVFTSGLE |
| | | GFKAKVNTIKEEEISLNKNNIVYMITHWSYSYYNFKGLKHRIKT |
| | | DQGVSTLEQNNTTHSLTNTNTKEALLTQIVDYLSKVPNEIYETL |
| | | SEKQQKEFEEDINEYMRENPENEDSTFSSIVSHKVIRKRYENKFN |
| | | YFAMRFLDEYAELPTLRFMVNFGDYIKDRQKKILESIQFDSERII |
| | | KKEIHLFEKLGLVTEYKKNVYLKETSNIDLSRFPLFPSPSYVMA |
| | | NNNIPFYIDSRSNNLDEYLNQKKKAQSQNRKRNLTFEKYNKEQ |
| | | SKDAIIAMLQKEIGVKDLQQRSTIGLLSCNELPSMLYEVIVKDIK |
| | | GAELENKIAQKIREQYQSIRDFTLDSPQKDNIPTTLTKTISTDTSV |
| | | TFENQPIDIPRLKNALQKELTLTQEKLLNVKQHEIEVDNYNRNK |
| | | NTYKFKNQPKDKVDDNKLQRKYVFYRNEIGQEANWLASDLIH |
| | | FMKNKSLWKGYMHNELQSFLAFFEDKKNDCIALLETVFNLKED |
| | | CILTKDLKNLFLKHGNFIDFYKEYLKLKEDFLNTESTFLENGFIG |
| | | LPPKILKKELSKRLNYIFIVFQKRQFIIKELEEKKNNLYADAINLS |
| | | RGIFDEKPTMIPFKKPNPDEFASWFVASYQYNNYQSFYELTPDK |
| | | IENDKKKKYKNLRAINKVKIQDYYLKLMVDTLYQDLFNQPLDK |
| | | SLSDFYVSKTDREKIKADAKAYQKRNDSFLWNKVIHLSLQNNR |
| | | ITANPKLKDIGKYKRALQDEKIATLLTYDDRTWTYALQKPEKE |
| | | NENDYKELHYTALNMELQEYEKVRSKKLLKQVQELEKQILDKF |
| | | YDFSNNATHPEDLEIEDKKGKRHPNFKLYITKALLKNESEIINLE |
| | | NIDIEILIKYYDYNTEKLKEKIKNMDEDEKAKIVNTKENYNKITN |
| | | VLIKKALVLIIIRNKMAHNQYPPKFIYDLATRFVPKKEEEYFACY |
| | | FNRVFETITTELWENKKKAKEIV |
| Porphyromonas | WP_06 | MTEQNERPYNGTYYTLEDKHFWAAFFNLARHNAYITLTHIDRQ |
| gingivalis | 115647 | LAYSKADITNDEDILFFKGQWKNLDNDLERKARLRSLILKHFSF |
| | 0 | LEGAAYGKKLFENKSSGNKSSKKKELTKKEKEELQANALSLDN |
| | (SEQ | LKSILFDFLQKLKDFRNYYSHYRHPESSELPLFDGNMLQRLYNV |
| | ID No. | FDVSVQRVKRDHEHNDKVDPHRHFNHLVRKGKKDRCGNNDN |
| | 181) | PFFKHHFVDREGKVTEAGLLFFVSLFLEKRDAIWMQKKIRGFK |
| | | GGTEAYQQMTNEVFCRSRISLPKLKLESLRTDDWMLLDMLNEL |
| | | VRCPKSLYDRLREEDRARFRVPVDILSDEDDTDGTEEDPFKNTL |
| | | VRHQDRFPYFALRYFDLKKVFTSLRFHIDLGTYHFAIYKKNIGE |
| | | QPEDRHLTRNLYGFGRIQDFAEEHRPEEWKRLVRDLDYFETGD |
| | | KPYITQTTPHYHIEKGKIGLRFVPEGQHLWPSPEVGATRTGRSK |
| | | YAQDKRLTAEAFLSVHELMPMMFYYFLLREKYSEEVSAEKVQ |
| | | GRIKRVIEDVYAVYDAFARGEIDTLDRLDACLADKGIRRGHLPR |
| | | QMIAILSQEHKDMEEKVRKKLQEMIADTDHRLDMLDRQTDRKI |
| | | RIGRKNAGLPKSGVIADWLVRDMMRFQPVAKDTSGKPLNNSK |
| | | ANSTEYRMLQRALALFGGEKERLTPYFRQMNLTGGNNPHPFLH |
| | | ETRWESHTNILSFYRSYLKARKAFLQSIGRSDREENHRFLLLKEP |
| | | KTDRQTLVAGWKSEFHLPRGIFTEAVRDCLIEMGYDEVGSYKE |
| | | VGFMAKAVPLYFERACKDRVQPFYDYPFNVGNSLKPKKGRFLS |
| | | KEKRAEEWESGKERFRLAKLKKEILEAKEHPYLDFKSWQKFER |
| | | ELRLVKNQDIITWMMCRDLMEENKVEGLDTGTLYLKDIRTEVQ |
| | | EQGSLNVLNRVKPMRLPVVVYRADSRGHVHKEQAPLATVYIEE |
| | | RDTKLLKQGNFKSFVKDRRLNGLFSFVDTGGLAMEQYPISKLR |
| | | VEYELAKYQTARVCAFEQTLELEESLLTRCPHLPDKNFRKMLES |
| | | WSDPLLDKWPDLQREVWLLIAVRNAFSHNQYPMYDEAVFSSIR |
| | | KYDPSSPDAIEERMGLNIAHRLSEEVKQAKEMAERIIQA |
| Porphyromonas | WP_06 | MNTVPASENKGQSRTVEDDPQYFGLYLNLARENLIEVESHVRIK |
| gingivalis | 115663 | FGKKKLNEESLKQSLLCDHLLSVDRWTKVYGHSRRYLPFLHYF |
| | 7 | DPDSQIEKDHDSKTGVDPDSAQRLIRELYSLLDFLRNDFSHNRL |
| | (SEQ | DGTTFEHLEVSPDISSFITGTYSLACGRAQSRFADFFKPDDFVLA |
| | ID No. | KNRKEQLISVADGKECLTVSGLAFFICLFLDREQASGMLSRIRGF |
| | 182) | KRTDENWARAVHETFCDLCIRHPHDRLESSNTKEALLLDMLNE |
| | | LNRCPRILYDMLPEEERAQFLPALDENSMNNLSENSLNEESRLL |
| | | WDGSSDWAEALTKRIRHQDRFPYLMLRFIEEMDLLKGIRFRVD |
| | | LGEIELDSYSKKVGRNGEYDRTITDHALAFGKLSDFQNEEEVSR |
| | | MISGEASYPVRFSLFAPRYAIYDNKIGYCHTSDPVYPKSKTGEK |
| | | RALSNPQSMGFISVHDLRKLLLMELLCEGSFSRMQSGFLRKANR |
| | | ILDETAEGKLQFSALFPEMRHRFIPPQNPKSKDRREKAETTLEKY |
| | | KQEIKGRKDKLNSQLLSAFDMNQRQLPSRLLDEWMNIRPASHS |
| | | VKLRTYVKQLNEDCRLRLRKFRKDGDGKARAIPLVGEMATFLS |
| | | QDIVRMIISEETKKLITSAYYNEMQRSLAQYAGEENRRQFRAIV |
| | | AELHLLDPSSGHPFLSATMETAHRYTEDFYKCYLEKKREWLAK |
| | | TFYRPEQDENTKRRISVFFVPDGEARKLLPLLIRRRMKEQNDLQ |
| | | DWIRNKQAHPIDLPSHLFDSKIMELLKVKDGKKKWNEAFKDW |
| | | WSTKYPDGMQPFYGLRRELNIHGKSVSYIPSDGKKFADCYTHL |
| | | MEKTVQDKKRELRTAGKPVPPDLAADIKRSFHRAVNEREFMLR |
| | | LVQEDDRLMLMAINKMMTDREEDILPGLKNIDSILDKENQFSLA |
| | | VHAKVLEKEGEGGDNSLSLVPATIEIKSKRKDWSKYIRYRYDR |
| | | RVPGLMSHFPEHKATLDEVKTLLGEYDRCRIKIFDWAFALEGAI |
| | | MSDRDLKPYLHESSSREGKSGEHSTLVKMLVEKKGCLTPDESQ |
| | | YLILIRNKAAHNQFPCAAEMPLIYRDVSAKVGSIEGSSAKDLPE |
| | | GSSLVDSLWKKYEMIIRKILPILDPENRFFGKLLNNMSQPINDL |
| Riemerella | WP_06 | MFFSFHNAQRVIFKHLYKAFDASLRMVKEDYKAHFTVNLTRDF |
| anatipestifer | 171013 | AHLNRKGKNKQDNPDFNRYRFEKDGFFTESGLLFFTNLFLDKR |
| | 8 | DAYWMLKKVSGFKASHKQSEKMTTEVFCRSRILLPKLRLESRY |
| | (SEQ | DHNQMLLDMLSELSRCPKLLYEKLSEKDKKCFQVEADGFLDEI |
| | ID No. | EEEQNPFKDTLIRHQDRFPYFALRYLDLNESFKSIRFQVDLGTYH |
| | 183) | YCIYDKKIGYEQEKRHLTRTLLNFGRLQDFTEINRPQEWKALTK |
| | | DLDYNETSNQPFISKTTPHYHITDNKIGFRLRTSKELYPSLEVKD |
| | | GANRIAKYPYNSDFVAHAFISISVHELLPLMFYQHLTGKSEDLL |
| | | KETVRHIQRIYKDFEEERINTIEDLEKANQGRLPLGAFPKQMLGL |
| | | LQNKQPDLSEKAKIKIEKLIAETKLLSHRLNTKLKSSPKLGKRRE |
| | | KLIKTGVLADWLVKDFMRFQPVVYDAQNQPIKSSKANSTESRLI |
| | | RRALALYGGEKNRLEGYFKQTNLIGNTNPHPFLNKFNWKACRN |
| | | LVDFYQQYLEQREKFLEAIKHQPWEPYQYCLLLKVPKENRKNL |
| | | VKGWEQGGISLPRGLFTEAIRETLSKDLTLSKPIRKEIKKHGRVG |
| | | FISRAITLYFKEKYQDKHQSFYNLSYKLEAKAPLLKKEEHYEYW |
| | | QQNKPQSPTESQRLELHTSDRWKDYLLYKRWQHLEKKLRLYR |
| | | NQDIMLWLMTLELTKNHFKELNLNYHQLKLENLAVNVQEADA |
| | | KLNPLNQTLPMVLPVKVYPTTAFGEVQYHETPIRTVYIREEQTK |
| | | ALKMGNFKALVKDRHLNGLFSFIKEENDTQKHPISQLRLRRELE |
| | | IYQSLRVDAFKETLSLEEKLLNKHASLSSLENEFRTLLEEWKKK |
| | | YAASSMVTDKHIAFIASVRNAFCHNQYPFYKETLHAPILLFTVA |
| | | QPTTEEKDGLGIAEALLRVLREYCEIVKSQI |
| Flavobacterium | WP_06 | MSSKNESYNKQKTFNHYKQEDKYFFGGFLNNADDNLRQVGKE |
| columnare | 374407 | FKTRINFNHNNNELASVFKDYFNKEKSVAKREHALNLLSNYFP |
| | 0 | VLERIQKHTNHNFEQTREIFELLLDTIKKLRDYYTHHYHKPITIN |
| | (SEQ | PKIYDFLDDTLLDVLITIKKKKVKNDTSRELLKEKLRPELTQLKN |
| | ID No. | QKREELIKKGKKLLEENLENAVFNHCLRPFLEENKTDDKQNKT |
| | 184) | VSLRKYRKSKPNEETSITLTQSGLVFLMSFFLHRKEFQVFTSGLE |
| | | GFKAKVNTIKEEKISLNKNNIVYMITHWSYSYYNFKGLKHRIKT |
| | | DQGVSTLEQNNTTHSLTNTNTKEALLTQIVDYLSKVPNEIYETL |
| | | SEKQQKEFEEDINEYMRENPENEDSTFSSIVSHKVIRKRYENKFN |
| | | YFAMRFLDEYAELPTLRFMVNFGDYIKDRQKKILESIQFDSERII |
| | | KKEIHLFEKLGLVTEYKKNVYLKETSNIDLSRFPLFPSPSYVMA |
| | | NNNIPFYIDSRSNNLDEYLNQKKKAQSQNRKRNLTFEKYNKEQ |
| | | SKDAIIAMLQKEIGVKDLQQRSTIGLLSCNELPSMLYEVIVKDIK |
| | | GAELENKIAQKIREQYQSIRDFTLNSPQKDNIPTTLIKTISTDTSV |
| | | TFENQPIDIPRLKNAIQKELALTQEKLLNVKQHEIEVNNYNRNK |
| | | NTYKFKNQPKDKVDDNKLQRKYVFYRNEIGQEANWLASDLIH |
| | | FMKNKSLWKGYMHNELQSFLAFFEDKKNDCIALLETVFNLKED |
| | | CILTKDLKNLFLKHGNFIDFYKEYLKLKEDFLNTESTFLENGFIG |
| | | LPPKILKKELSKRLNYIFIVFQKRQFIIKELEEKKNNLYADAINLS |
| | | RGIFDEKPTMIPFKKPNPDEFASWFVASYQYNNYQSFYELTPDK |
| | | IENDKKKKYKNLRAINKVKIQDYYLKLMVDTLYQDLFNQPLDK |
| | | SLSDFYVSKTDREKIKADAKAYQKRNDSFLWNKVIHLSLQNNR |
| | | ITANPKLKDIGKYKRALQDEKIATLLTYDDRTWTYALQKPEKE |
| | | NENDYKELHYTALNMELQEYEKVRSKKLLKQVQELEKQILDKF |
| | | YDFSNNATHPEDLEIEDKKGKRHPNFKLYITKALLKNESEIINLE |
| | | NIDIEILIKYYDYNTEKLKEKIKNMDEDEKAKIVNTKENYNKITN |
| | | VLIKKALVLIIIRNKMAHNQYPPKFIYDLATRFVPKKEEEYFACY |
| | | FNRVFETITTELWENKKKAKEIV |
| Riemerella | WP_06 | MEKPLPPNVYTLKHKFFWGAFLNIAREINAFITICHINEQLGLTTP |
| anatipestifer | 497088 | PNDDKIADVVCGTWNNILNNDHDLLKKSQLTELILKHFPFLAA |
| | 7 | MCYHPPKKEGKKKGSQKEQQKEKENEAQSQAEALNPSELIKVL |
| | (SEQ | KTLVKQLRTLRNYYSHESHKKPDAEKDIFKHLYKAFDASLRMV |
| | ID No. | KEDYKAHFTVNLTQDFAHLNRKGKNKQDNPDFDRYRFEKDGF |
| | 185) | FTESGLLFFTNLFLDKRDAYWMLKKVSGFKASHKQSEKMTTEV |
| | | FCRSRILLPKLRLESRYDHNQMLLDMLSELSRYPKLLYEKLSEE |
| | | DKKRFQVEADGFLDEIEEEQNPFKDTLIRHQDRFPYFALRYLDL |
| | | NESFKSIRFQVDLGTYHYCIYDKKIGDEQEKRHLTRTLLSFGRL |
| | | QDFTEINRPQEWKALTKDLDYKETSKQPFISKTTPHYHITDNKIG |
| | | FRLGTSKELYPSLEVKDGANRIAQYPYNSDFVAHAFISVHELLP |
| | | LMFYQHLTGKSEDLLKETVRHIQRIYKDFEEERINTIEDLEKANQ |
| | | GRLPLGAFPKQMLGLLQNKQPDLSEKAKIKIEKLIAETKLLSHR |
| | | LNTKLKSSPKLGKRREKLIKTGVLADWLVKDFMRFQPVAYDA |
| | | QNQPIESSKANSTEFQLIQRALALYGGEKNRLEGYFKQTNLIGN |
| | | TNPHPFLNKFNWKACRNLVDFYQQYLEQREKFLEAIKNQPWEP |
| | | YQYCLLLKIPKENRKNLVKGWEQGGISLPRGLFTEAIRETLSKD |
| | | LTLSKPIRKEIKKHGRVGFISRAITLYFREKYQDDHQSFYDLPYK |
| | | LEAKASPLPKKEHYEYWQQNKPQSPTELQRLELHTSDRWKDYL |
| | | LYKRWQHLEKKLRLYRNQDVMLWLMTLELTKNHFKELNLNY |
| | | HQLKLENLAVNVQEADAKLNPLNQTLPMVLPVKVYPATAFGE |
| | | VQYQETPIRTVYIREEQTKALKMGNFKALVKDRRLNGLFSFIKE |
| | | ENDTQKHPISQLRLRRELEIYQSLRVDAFKETLNLEEKLLKKHTS |
| | | LSSVENKFRILLEEWKKEYAASSMVTDEHIAFIASVRNAFCHNQ |
| | | YPFYEEALHAPIPLFTVAQQTTEEKDGLGIAEALLRVLREYCEIV |
| | | KSQI |
| Sinomicrobium | WP_07 | MESTTTLGLHLKYQHDLFEDKHYFGGGVNLAVQNIESIFQAFA |
| oceani | 231947 | ERYGIQNPLRKNGVPAINNIFHDNISISNYKEYLKFLKQYLPVVG |
| | 6.1 | FLEKSNEINIFEFREDFEILINAIYKLRHFYTHYYHSPIKLEDRFYT |
| | (SEQ | CLNELFVAVAIQVKKHKMKSDKTRQLLNKNLHQLLQQLIEQKR |
| | ID No. | EKLKDKKAEGEKVSLDTKSIENAVLNDAFVHLLDKDENIRLNY |
| | 186) | SSRLSEDIITKNGITLSISGLLFLLSLFLQRKEAEDLRSRIEGFKGK |
| | | GNELRFMATHWVFSYLNVKRIKHRLNTDFQKETLLIQIADELSK |
| | | VPDEVYKTLDHENRSKFLEDINEYIREGNEDASLNESTVVHGVI |
| | | RKRYENKFHYLVLRYLDEFVDFPSLRFQVHLGNYIHDRRDKVI |
| | | DGTNFITNRVIKEPIKVFGKLSHVSKLKSDYMESLSREHKNGWD |
| | | VFPNPSYNFVGHNIPIFINLRSASSKGKELYRDLMKIKSEKKKKS |
| | | REEGIPMERRDGKPTKIEISNQIDRNIKDNNFKDIYPGEPLAMLS |
| | | LNELPALLFELLRRPSITPQDIEDRMVEKLYERFQIIRDYKPGDG |
| | | LSTSKISKKLRKADNSTRLDGKKLLRAIQTETRNAREKLHTLEE |
| | | NKALQKNRKRRTVYTTREQGREASWLAQDLKRFMPIASRKEW |
| | | RGYHHSQLQQILAFYDQNPKQPLELLEQFWDLKEDTYVWNSWI |
| | | HKSLSQHNGFVPMYEGYLKGRLGYYKKLESDIIGFLEEHKVLK |
| | | RYYTQQHLNVIFRERLYFIKTETKQKLELLARPLVFPRGIFDDKP |
| | | TFVQDKKVVDHPELFADWYVYSYKDDHSFQEFYHYKRDYNEI |
| | | FETELSWDIDFKDNKRQLNPSEQMDLFRMKWDLKIKKIKIQDIF |
| | | LKIVAEDIYLKIFGHKIPLSLSDFYISRQERLTLDEQAVAQSMRLP |
| | | GDTSENQIKESNLWQTTVPYEKEQIREPKIKLKDIGKFKYFLQQ |
| | | QKVLNLLKYDPQHVWTKAELEEELYIGKHSYEVVRREMLLQK |
| | | CHQLEKHILEQFRFDGSNHPRELEQGNHPNFKMYIVNGILTKRG |
| | | ELEIEAENWWLELGNSKNSLDKVEVELLTMKTIPEQKAFLLILIR |
| | | NKFAHNQLPADNYFHYASNLMNLKKSDTYSLFWFTVADTIVQ |
| | | EFMSL |
| Reichenbachiella | WP_07 | MKTNPLIASSGEKPNYKKFNTESDKSFKKIFQNKGSIAPIAEKAC |
| agariperforans | 312444 | KNFEIKSKSPVNRDGRLHYFSVGHAFKNIDSKNVFRYELDESQM |
| | 1.1 | DMKPTQFLALQKEFFDFQGALNGLLKHIRNVNSHYVHTFEKLEI |
| | (SEQ | QSINQKLITFLIEAFELAVIHSYLNEEELSYEAYKDDPQSGQKLV |
| | ID No. | QFLCDKFYPNKEHEVEERKTILAKNKRQALEHLLFIEVTSDIDW |
| | 187) | KLFEKHKVFTISNGKYLSFHACLFLLSLFLYKSEANQLISKIKGF |
| | | KRNDDNQYRSKRQIFTFFSKKFTSQDVNSEEQHLVKFRDVIQYL |
| | | NHYPSAWNKHLELKSGYPQMTDKLMRYIVEAEIYRSFPDQTDN |
| | | HRFLLFAIREFFGQSCLDTWTGNTPINFSNQEQKGFSYEINTSAEI |
| | | KDIETKLKALVLKGPLNFKEKKEQNRLEKDLRREKKEQPTNRV |
| | | KEKLLTRIQHNMLYVSYGRNQDRFMDFAARFLAETDYFGKDA |
| | | KFKMYQFYTSDEQRDHLKEQKKELPKKEFEKLKYHQSKLVDY |
| | | FTYAEQQARYPDWDTPFVVENNAIQIKVTLFNGAKKIVSVQRN |
| | | LMLYLLEDALYSEKRENAGKGLISGYFVHHQKELKDQLDILEK |
| | | ETEISREQKREFKKLLPKRLLHRYSPAQINDTTEWNPMEVILEEA |
| | | KAQEQRYQLLLEKAILHQTEEDFLKRNKGKQFKLRFVRKAWH |
| | | LMYLKELYMNKVAEHGHHKSFHITKEEFNDFCRWMFAFDEVP |
| | | KYKEYLCDYFSQKGFFNNAEFKDLIESSTSLNDLYEKTKQRFEG |
| | | WSKDLTKQSDENKYLLANYESMLKDDMLYVNISHFISYLESKG |
| | | KINRNAHGHIAYKALNNVPHLIEEYYYKDRLAPEEYKSHGKLY |
| | | NKLKTVKLEDALLYEMAMHYLSLEPALVPKVKTKVKDILSSNI |
| | | AFDIKDAAGHHLYHLLIPFHKIDSFVALINHQSQQEKDPDKTSFL |
| | | AKIQPYLEKVKNSKDLKAVYHYYKDTPHTLRYEDLNMIHSHIV |
| | | SQSVQFTKVALKLEEYFIAKKSITLQIARQISYSEIADLSNYFTDE |
| | | VRNTAFHFDVPETAYSMILQGIESEFLDREIKPQKPKSLSELSTQ |
| | | QVSVCTAFLETLHNNLFDRKDDKKERLSKARERYFEQIN |

[0586] In certain example embodiments, the RNA-targeting effector protein is a Cas13c effect protein as disclosed in PCT Application No. US18/39595 filed Jun. 26, 2018, and PCT Application No. US 2017/047193 filed Aug. 16, 2017. In certain example embodiments, the CRISPR effector protein is a Cas13c protein from Table 4A or 4B.

TABLE 4A

| | | |
|---|---|---|
| Fusobacterium | | MEKFRRQNRNSIIKIIISNYDTKGIKELKVRYRKQAQLDTFIIKTEI |
| necrophorum | | VNNDIFIKSIIEKAREKYRYSFLFDGEEKYHFKNKSSVEIVKKDIF |
| subsp. | | SQTPDNMIRNYKITLKISEKNPRVVEAEIEDLMNSTILKDGRRSA |
| funduliforme | | RREKSMTERKLIEEKVAKNYSLLANCPMEEVDSIKIYKIKRFLT |
| ATCC51357 | | YRSNMLLYFASINSFLCEGIKGKDNETEEIWHLKDNDVRKEKV |
| contig00003 | | RENFKNKLIQSTENYNSSLKNQIEEKEKLLRKEFKKGAFYRTIIK |
| (SEQ ID No. | | KLQQERIKELSEKSLTEDCEKIIKLYSKLRHSLMHYDYQYFENLF |
| 188) | | ENKKNDDLMKDLNLDLFKSLPLIRKMKLNNKVNYLEDGDTLF |
| | | VLQKTKKAKTLYQIYDALCEQKNGFNKFINDFFVSDGEENTVF |
| | | KQIINEKFQSEMEFLEKRISESEKKNEKLKKKLDSMKAHFRNINS |
| | | EDTKEAYFWDIHSSRNYKTKYNERKNLVNEYTELLGSSKEKKL |
| | | LREEITKINRQLLKLKQEMEEITKKNSLFRLEYKMKIAFGFLFCE |
| | | FDGNISKFKDEFDASNQEKIIQYHKNGEKYLTSFLKEEEKEKFNL |
| | | EKMQKIIQKTEEEDWLLPETKNNLFKFYLLTYLLLPYELKGDFL |
| | | GFVKKHYYDIKNVDFIDENQNNIQVSQTVEKQEDYFYHKIRLFE |
| | | KNTKKYEIVKYSIVPNEKLKQYFEDLGIDIKYLTVEQKSEVSEEK |
| | | NKKVSLKNNGMFNKTILLFVFKYYQIAFKLFNDIELYSLFFLRE |
| | | KSGKPLEIFRKELESKMKDGYLNFGQLLYVVYEVLVKNKDLDK |
| | | ILSKKIDYRKDKSFSPEIAYLRNFLSHLNYSKFLDNFMKINTNKS |
| | | DENKEVLIPSIKIQKMIQFIEKCNLQNQIDFDFNFVNDFYMRKEK |
| | | MFFIQLKQIFPDINSTEKQKMNEKEEILRNRYHLTDKKNEQIKDE |
| | | HEAQSQLYEKILSLQKIYSSDKNNFYGRLKEEKLLFLEKQGKKK |
| | | LSMEEIKDKIAGDISDLLGILKKEITRDIKDKLTEKFRYCEEKLLN |
| | | LSFYNHQDKKKEESIRVFLIRDKNSDNFKFESILDDGSNKIFISKN |
| | | GKEITIQCCDKVLETLIIEKNTLKISSNGKIISLIPHYSYSIDVKY |
| Fusobacterium | (SEQ | MEKFRRQNRSSIIKIIISNYDTKGIKELKVRYRKQAQLDTFIIKTEI |
| necrophorum | ID | VNNDIFIKSIIEKAREKYRYSFLFDGEEKYHFKNKSSVEIVKKDIF |
| DJ-2 | No. | SQTPDNMIRNYKITLKISEKNPRVVEAEIEDLMNSTILKDGRRSA |
| contig0065, | 189) | RREKSMTERKLIEEKVAENYSLLANCPMEEVDSIKIYKIKRFLTY |
| whole genome | | SRSNMLLYFAINSFLCEGIKGKDNETEEIWHLKDNDVRKEKVKE |
| shotgun | | NFKNKLIQSTENYNSSLKNQIEEKEKLLRKESKKGAFYRTIIKKL |
| sequence | | QQERIKELSEKSLTEDCEKIIKLYSELRHPLMHYDYQYFENLFEN |
| (SEQ ID No. | | KENSELTKNLNLDIFKSLPLVRKMKLNNKVNYLEDNDTLFVLQ |
| 189) | | KTKKAKTLYQIYDALCEQKNGFNKFINDFFVSDGEENTVFKQII |
| | | NEKFQSEIEFLEKRISESEKKNEKLKKKLDSMKAHFRNINSEDTK |
| | | EAYFWDIHSSRNYKTKYNERKNLVNEYTELLGSSKEKKLLREEI |
| | | TKINRQLLKLKQEMEEITKKNSLFRLEYKMKMAFGFLFCEFDG |
| | | NISRFKDEFDASNQEKIIQYHKNGEKYLTYFLKEEEKEKFNLKK |
| | | LQETIQKTGEENWLLPQNKNNLFKFYLLTYLLLPYELKGDFLGF |
| | | VKKHYYDIKNVDFMDENQSSKIIESKEDDFYHKIRLFEKNTKKY |
| | | EIVKYSIVPDKKLKQYFKDLGIDTKYLILDQKSEVSGEKNKKVS |
| | | LKNNGMFNKTILLFVFKYYQIAFKLFNDIELYSLFFLREKSGKPF |
| | | EVFLKELKDKMIGKQLNFGQLLYVVYEVLVKNKDLSEILSERID |
| | | YRKDMCFSAEIADLRNFLSHLNYSKFLDNFMKINTNKSDENKE |
| | | VLIPSIKIQKMIKFIEECNLQSQIDFDFNFVNDFYMIRKEKMFFIQL |
| | | KQIFPDINSTEKQKMNEKEEILRNRYHLTDKKNEQIKDEHEAQS |
| | | QLYEKILSLQKIYSSDKNNFYGRLKEEKLLFLEKQEKKKLSMEEI |
| | | KDKIAGDISDLLGILKKEITRDIKDKLTEKFRYCEEKLLNLSFYN |
| | | HQDKKKEESIRVFLIRDKNSDNFKFESILDDGSNKIFISKNGKEIT |
| | | IQCCDKVLETLIIEKNTLKISSNGKIISLIPHYSYSIDVKY |
| Fusobacterium | | MKVRYRKQAQLDTFIIKTEIVNNDIFIKSIIEKAREKYRYSFLFDG |
| necrophorum | | EEKYHFKNKSSVEIVKNDIFSQTPDNMIRNYKITLKISEKNPRVV |
| BFTR-1 | | EAEIEDLMNSTILKDGRRSARREKSMTERKLIEEKVAENYSLLA |
| contig0068 | | NCPIEEVDSIKIYKIKRFLTYRSNMLLYFASINSFLCEGIKGKDNE |
| (SEQ ID No. | | TEEIWHLKDNDVRKEKVKENFKNKLIQSTENYNSSLKNQIEEKE |
| 190) | | KLSSKEFKKGAFYRTIIKKLQQERIKELSEKSLTEDCEKIIKLYSE |
| | | LRHPLMHYDYQYFENLFENKENSELTKNLNLDIFKSLPLVRKM |
| | | KLNNKVNYLEDNDTLFVLQKTKKAKTLYQIYDALCEQKNGFN |
| | | KFINDFFVSDGEENTVFKQIINEKFQSEMEFLEKRISESEKKNEKL |
| | | KKKLDSMKAHFRNINSEDTKEAYFWDIHSSRNYKTKYNERKNL |
| | | VNEYTKLLGSSKEKKLLREEITKINRQLLKLKQEMEEITKKNSLF |
| | | RLEYKMKIAFGFLFCEFDGNISKFKDEFDASNQEKIIQYHKNGE |
| | | KYLTSFLKEEEKEKFNLEKMQKIIQKTEEEDWLLPETKNNLFKF |
| | | YLLTYLLLPYELKGDFLGFVKKHYYDIKNVDFMDENQNNIQVS |
| | | QTVEKQEDYFYHKIRLFEKNTKKYEIVKYSIVPNEKLKQYFEDL |
| | | GIDIKYLTGSVESGEKWLGENLGIDIKYLTVEQKSEVSEEKNKK |
| | | VSLKNNGMFNKTILLFVFKYYQIAFKLFNDIELYSLFFLREKSEK |
| | | PFEVFLEELKDKMIGKQLNFGQLLYVVYEVLVKNKDLDKILSK |
| | | KIDYRKDKSFSPEIAYLRNFLSHLNYSKFLDNFMKINTNKSDEN |
| | | KEVLIPSIKIQKMIQFIEKCNLQNQIDFDFNFVNDFYMRKEKMFF |
| | | IQLKQIFPDINSTEKQKKSEKEEILRKRYHLINKKNEQIKDEHEA |
| | | QSQLYEKILSLQKIFSCDKNNFYRRLKEEKLLFLEKQGKKKISM |
| | | KEIKDKIASDISDLLGILKKEITRDIKDKLTEKFRYCEEKLLNISFY |
| | | NHQDKKKEEGIRVFLIRDKNSDNFKFESILDDGSNKIFISKNGKEI |
| | | TIQCCDKVLETLMIEKNTLKISSNGKIISLIPHYSYSIDVKY |
| Fusobacterium | | MTEKKSIIFKNKSSVEIVKKDIFSQTPDNMIRNYKITLKISEKNPR |
| necrophorum | | VVEAEIEDLMNSTILKDGRRSARREKSMTERKLIEEKVAENYSL |
| subsp. | | LANCPMEEVDSIKIYKIKRFLTYRSNMLLYFASINSFLCEGIKGK |
| funduliforme | | DNETEEIWHLKDNDVRKEKVKENFKNKLIQSTENYNSSLKNQIE |
| 1_1_36S | | EKEKLLRKESKKGAFYRTIIKKLQQERIKELSEKSLTEDCEKIIKL |
| cont1.14 | | YSELRHPLMHYDYQYFENLFENKENSELTKNLNLDIFKSLPLVR |
| (SEQ ID No. | | KMKLNNKVNYLEDNDTLFVLQKTKKAKTLYQIYDALCEQKNG |
| 191) | | FNKFINDFFVSDGEENTVFKQIINEKFQSEMEFLEKRISESEKKNE |
| | | KLKKKFDSMKAHFHNINSEDTKEAYFWDIHSSSNYKTKYNERK |
| | | NLVNEYTELLGSSKEKKLLREEITQINRKLLKLKQEMEEITKKNS |
| | | LFRLEYKMKIAFGFLFCEFDGNISKFKDEFDASNQEKIIQYHKNG |
| | | EKYLTYFLKEEEKEKFNLEKMQKIIQKTEEEDWLLPETKNNLFK |
| | | FYLLTYLLLPYELKGDFLGFVKKHYYDIKNVDFMDENQNNIQV |
| | | SQTVEKQEDYFYHKIRLFEKNTKKYEIVKYSIVPNEKLKQYFED |
| | | LGIDIKYLTGSVESGEKWLGENLGIDIKYLTVEQKSEVSEEKIKK |
| | | FL |
| Fusobacterium | | MGKPNRSSIIKIIISNYDNKGIKEVKVRYNKQAQLDTFLIKSELK |
| perfoetens | | DGKFILYSIVDKAREKYRYSFEIDKTNINKNEILIIKKDIYSNKED |
| ATCC29250 | | KVIRKYILSFEVSEKNDRTIVTKIKDCLETQKKEKFERENTRRLIS |
| T364DRAFT_ | | ETERKLLSEETQKTYSKIACCSPEDIDSVKIYKIKRYLAYRSNML |
| scaffo1d00009.9_ | | LFFSLINDIFVKGVVKDNGEEVGEIWRIIDSKEIDEKKTYDLLVE |
| C | | NFKKRMSQEFINYKQSIENKIEKNTNKIKEIEQKLKKEKYKKEIN |
| (SEQ ID No. | | RLKKQLIELNRENDLLEKDKIELSDEEIREDIEKILKIYSDLRHKL |
| 192) | | MHYNYQYFENLFENKKISKEKNEDVNLTELLDLNLFRYLPLVR |
| | | QLKLENKTNYLEKEDKITVLGVSDSAIKYYSYYNFLCEQKNGF |
| | | NNFINSFFSNDGEENKSFKEKINLSLEKEIEIMEKETNEKIKEINK |
| | | NELQLMKEQKELGTAYVLDIHSLNDYKISHNERNKNVKLQNDI |
| | | MNGNRDKNALDKINKKLVELKIKMDKITKRNSILRLKYKLQVA |
| | | YGFLMEEYKGNIKKFKDEFDISKEKIKSYKSKGEKYLEVKSEKK |
| | | YITKILNSIEDIHNITWLKNQEENNLFKFYVLTYILLPFEFRGDFL |
| | | GFVKKHYYDIKNVEFLDENNDRLTPEQLEKMKNDSFFNKIRLFE |
| | | KNSKKYDILKESILTSERIGKYFSLLNTGAKYFEYGGEENRGIFN |
| | | KNIIIPIFKYYQIVLKLYNDVELAMLLTLSESDEKDINKIKELVTL |
| | | KEKVSPKKIDYEKKYKFSVLLDCFNRIINLGKKDFLASEEVKEV |
| | | AKTFTNLAYLRNKICHLNYSKFIDDLLTIDTNKSTTDSEGKLLIN |
| | | DRIRKLIKFIRENNQKMNISIDYNYINDYYMKKEKFIFGQRKQA |
| | | KTIIDSGKKANKRNKAEELLKMYRVKKENINLIYELSKKLNELT |
| | | KSELFLLDKKLLKDIDFTDVKIKNKSFFELKNDVKEVANIKQAL |
| | | QKHSSELIGIYKKEVIMAIKRSIVSKLIYDEEKVLSIIIYDKTNKK |
| | | YEDFLLEIRRERDINKFQFLIDEKKEKLGYEKIIETKEKKKVVVKI |
| | | QNNSELVSEPRIIKNKDKKKAKTPEEISKLGILDLTNHYCFNLKI |
| | | TL |
| Fusobacterium | | MENKGNNKKIDFDENYNILVAQIKEYFTKEIENYNNRIDNIIDKK |
| ulcerans ATCC | | ELLKYSEKKEESEKNKKLEELNKLKSQKLKILTDEEIKADVIKII |
| 49185 cont2.38 | | KIFSDLRHSLMEIYEYKYFENLFENKKNEELAELLNLNLFKNLTL |
| (SEQ ID No. | | LRQMKIENKTNYLEGREEFNIIGKNIKAKEVLGHYNLLAEQKNG |
| 193) | | FNNFINSFFVQDGTENLEFKKLIDEHFVNAKKRLERNIKKSKKLE |
| | | KELEKMEQHYQRLNCAYVWDIHTSTTYKKLYNKRKSLIEEYN |
| | | KQINEIKDKEVITAINVELLRIKKEMEEITKSNSLFRLKYKMQIA |
| | | YAFLEIEFGGNIAKFKDEFDCSKMEEVQKYLKKGVKYLKYYKD |
| | | KEAQKNYEEPFEEIFENKDTHNEEWLENTSENNLFKFYILTYLLL |
| | | PMEFKGDFLGVVKKHYYDIKNVDFTDESEKELSQVQLDKMIGD |
| | | SFFHKIRLFEKNTKRYEIIKYSILTSDEIKRYFRLLELDVPYFEYE |
| | | KGTDEIGIFNKNIILTIFKYYQIIFRLYNDLEIHGLFNISSDLDKILR |
| | | DLKSYGNKNINFREFLYVIKQNNNSSTEEEYRKIWENLEAKYLR |
| | | LHLLTPEKEEIKTKTKEELEKLNEISNLRNGICHLNYKEIIEEILKT |
| | | EISEKNKEATLNEKIRKVINFIKENELDKVELGFNFINDFFMKKE |
| | | QFMFGQIKQVKEGNSDSITTERERKEKNNKKLKETYELNCDNL |
| | | SEFYETSNNLRERANSSSLLEDSAFLKKIGLYKVKNNKVNSKVK |
| | | DEEKRIENIKRKLLKDSSDIMGMYKAEVVKKLKEKLILIFKHDE |
| | | EKRIYVTVYDTSKAVPENISKEILVKRNNSKEEYFFEDNNKKYV |
| | | TEYYTLEITETNELKVIPAKKLEGKEFKTEKNKENKLMLNNHYC |
| | | FNVKIIY |
| Anaerosalibacter | | MKSGRREKAKSNKSSIVRVIISNFDDKQVKEIKVLYTKQGGIDVI |
| sp. ND1 | | KFKSTEKDEKGRMKFNFDCAYNRLEEEEFNSFGGKGKQSFFVT |
| genome | | TNEDLTELHVTKRHKTTGEIIKDYTIQGKYTPIKQDRTKVTVSIT |
| assembly | | DNKDHFDSNDLGDKIRLSRSLTQYTNRILLDADVMKNYREIVCS |
| Anaerosalibacter | | DSEKVDETINIDSQEIYKINRFLSYRSNMIIYYQMINNFLLHYDG |
| massiliensis | | EEDKGGNDSINLINEIWKYENKKNDEKEKIIERSYKSIEKSINQYI |
| ND1 | | LNHNTEVESGDKEKKIDISEERIKEDLKKTFILFSRLRHYMVHYN |
| (SEQ ID No. | | YKFYENLYSGKNFIIYNKDKSKSRRFSELLDLNIFKELSKIKLVK |
| 194) | | NRAVSNYLDKKTTIHVLNKNINAIKLLDIYRDICETKNGFNNFIN |
| | | NMMTISGEEDKEYKEMVTKHFNENMNKLSIYLENFKKHSDFKT |
| | | NNKKKETYNLLKQELDEQKKLRLWFNAPYVYDIHSSKKYKEL |
| | | YVERKKYVDIHSKLIEAGINNDNKKKLNEINVKLCELNTEMKE |
| | | MTKLNSKYRLQYKLQLAFGFILEEFNLDIDKFVSAFDKDNNLTI |
| | | SKFMEKRETYLSKSLDRRDNRFKKLIKDYKFRDTEDIFCSDREN |
| | | NLVKLYILMYILLPVEIRGDFLGFVKKNYYDLKHVDFIDKRNND |
| | | NKDTFFHDLRLFEKNVKRLEVTSYSLSDGFLGKKSREKFGKELE |
| | | KFIYKNVSIALPTNIDIKEFNKSLVLPMMKNYQIIFKLLNDIEISA |
| | | LFLIAKKEGNEGSITFKKVIDKVRKEDMNGNINFSQVMKMALN |
| | | EKVNCQIRNSIAHINMKQLYIEPLNIYINNNQNKKTISEQMEEIID |
| | | ICITKGLTGKELNKNIINDYYMKKEKLVFNLKLRKRNNLVSIDA |
| | | QQKNMKEKSILNKYDLNYKDENLNIKEIILKVNDLNNKQKLLK |
| | | ETTEGESNYKNALSKDILLLNGIIRKNINFKIKEMILGIIQQNEYR |
| | | YVNINIYDKIRKEDHNIDLKINNKYIEISCYENKSNESTDERINFK |
| | | IKYMDLKVKNELLVPSCYEDIYIKKKIDLEIRYIENCKVVYIDIY |
| | | YKKYNINLEFDGKTLFVKFNKDVKKNNQKVNLESNYIQNIKFIV |
| | | S |

TABLE 4B

| Name | sequence |
|---|---|
| EH019 | mtekksiifknkssveivkkdifsqtpdnmirnykitlkiseknprvveaeiedlmnstilkdgrrsarreksmte |
| 081 | rklieekvaenysllancpmeevdsikiykikrfltyrsnmllyfasinsflcegikgkdneteeiwhlkdndvrke |
| | kvkenfknkliqstenynsslknqieekekllrkeskkgafyrtiikklqqerikelseksltedcekiiklyselrhpl |
| | mhydyqyfenlfenkenseltknlnldifkslplvrkmklnnkynyledndtlfvlqktkkaktlyqiydalceqk |
| | ngfnkfindffysdgeentvfkqiinekfqsemeflekrisesekkneklkkkfdsmkahfhninsedtkeayf |
| | wdihsssnyktkynerknlvneytellgsskekkllreeitqinrkllklkqemeeitkknslfrleykmkiafgflf |
| | cefdgniskfkdefdasnqekiiqyhkngekyltyflkeeekekfnlekmqkiiqkteeedwllpetknnlfkfy |
| | lltylllpyelkgdflgfvkkhyydiknvdfmdenqnniqvsqtvekqedyfyhkirlfekntkkyeivkysivpn |
| | eklkqyfedlgidikyltgsvesgekwlgenlgidikyltveqksevseekikkfl |
| WP_0 | mekdkkgekidisqemieedlrkililfsrlrhsmvhydyefyqalysgkdfvisdknnlenrmisqlldlnifkel |
| 94899 | skyklikdkaisnyldknttihvlgqdikairlldiyrdicgskngfnkfintmitisgeedreykekviehfnkkme |
| 336 | nlstyleklekqdnakrnnkrvynllkqklieqqklkewfggpyvydihsskrykelyierkklvdrhsklfeegld |
| | eknkkeltkindelsklnsemkemtklnskyrlqyklqlafgfileefdlnidtfinnfdkdkdliisnfmkkrdiyl |
| | nrvldrgdnrlkniikeykfrdtedifcndrdnnlvklyilmyillpveirgdflgfvkknyydmkhvdfidkkdke |
| | dkdtffhdlrlfeknirkleitdyslssgflskehkvdiekkindfinrngamklpeditieefnkslilpimknyqin |
| | fkllndieisalfkiakdrsitfkqaideiknedikknskkndknnhkdkninftqlmkralhekipykagmyqir |
| | nnishidmeqlyidplnsymnsnknnitiseqiekiidvcvtggvtgkelnnniindyymkkeklvfnlklrkqn |
| | divsiesqeknkreefvfkkygldykdgeiniieviqkvnslqeelrniketskeklknketlfrdislingtirkninf |
| | kikemvldivrmdeirhinihiyykgenytrsniikfkyaidgenkkyylkqheindinlelkdkfvtlicnmdkh |
| | pnknkqtinlesnyiqnvkfiip |
| WP_0 | menkgnnkkidfdenynilvaqikeyftkeienynnridniidkkellkysekkeeseknkkleelnklksqklk |
| 40490 | iltdeeikadvikiikifsdlrhslmhyeykyfenlfenkkneelaellnlnlfknltllrqmkienktnylegreefni |
| 876 | igknikakevlghynllaeqkngfnnfinsffvqdgtenlefkklidehfvnakkrlernikkskklekelekmeq |
| | hyqrlncayvwdihtsttykklynkrkslieeynkqineikdkevitainvellrikkemeeitksnslfrlkykmq |
| | iayafleiefggniakfkdefdcskmeevqkylkkgvkylkyykdkeaqknyefpfeeifenkdthneewlen |
| | tsennlfkfyiltylllpmefkgdflgyvkkhyydiknvdftdesekelsqvqldkmigdsffhkirlfekntkryeii |
| | kysiltsdeikryfrlleldvpyfeyekgtdeigifnkniiltifkyyqiifrlyndleihglfnissdldkilrdlksygnkn |
| | infreflyvikqnnnssteeeyrkiwenleakylrlhlltpekeeiktktkeeleklneisnlrngichlnykeiieeil |
| | kteiseknkeatlnekirkvinfikeneldkvelgfnfindffmkkeqfmfgqikqvkegnsdsittererkekn |
| | nkklketyelncdnlsefyetsnnlreranssslledsaflkkiglykvknnkvnskvkdeekrienikrkllkdssd |
| | imgmykaevvkklkeklilifkhdeekriyvtvydtskaypeniskeilvkrnnskeeyffednnkkyyteyytl |
| | eitetnelkvipakklegkefkteknkenklmlnnhycfnvkiiy |
| WP_0 | meeikhkknkssiirvivsnydmtgikeikvlyqkqggvdtfnlktiinlesgnleiisckpkerekyryefnckte |
| 47396 | intisitkkdkvlkkeirkyslelyfknekkdtvvakvtdllkapdkiegernhlrklsssterkllsktlcknyseiskt |
| 607 | pieeidsikiykikrflnyrsnfliyfalindflcagvkeddinevwliqdkehtaflenriekitdyifdklskdienk |
| | knqfekrikkyktsleelktetleknktfyidsiktkitnlenkitelslynskeslkedlikiisiftnlrhslmhydyks |
| | fenlfenieneelknlldlnlfksirmsdefktknrtnyldgtesftivkkhqnlkklytyynnlcdkkngfntfinsf |
| | fvtdgientdfknliilhfekemeeykksieyykikisneknkskkeklkekidllqselinmrehknllkqiyffdi |
| | hnsikykelyserknlieqynlqingykdvtainhintkllslknkmdkitkqnslyrlkyklkiaysflmiefdgdv |
| | skfknnfdptnlekrveyldkkeeylnytapknkfnfakleeelqkiqstsemgadylnvspennlfkfyiltyi |
| | mlpvefkgdflgfvknhyyniknydfmdeslldenevdsnklnekienlkdssffnkirlfeknikkyeivkysv |
| | stqenmkeyfkqlnldipyldykstdeigifnknmilpifkyyqnvfklcndieihallalankkqqnleyaiyccs |
| | kknslnynellktfnrktyqnlsfirnkiahlnykelfsdlfnneldlntkvrcliefsqnnkfdqidlgmnfindyy |
| | mkktrfifnqrrlrdlnvpskekiidgkrkqqndsnnellkkyglsrtnikdifnkawy |
| WP_0 | mkvryrkqaqldtfiikteivnndifiksiiekarekyrysflfdgeekyhfknkssveivkndifsqtpdnmirny |
| 35935 | kitlkiseknprvveaeiedlmnstilkdgrrsarreksmterklieekvaenysllancpieevdsikiykikrflty |
| 671 | rsnmllyfasinsflcegikgkdneteeiwhlkdndvrkekvkenfknkliqstenynsslknqieekeklsskef |
| | kkgafyrtiikklqqerikelseksltedcekiiklyselrhplmhydyqyfenlfenkenseltknlnldifkslplvr |
| | kmklnnkvnyledndtlfvlqktkkaktlyqiydalceqkngfnkfindffvsdgeentvfkqiinekfqsemef |
| | lekrisesekkneklkkkldsmkahfrninsedtkeayfwdihssrnyktkynerknlvneytkllgsskekkllr |
| | eeitkinrqllklkqemeeitkknslfrleykmkiafgflfcefdgniskfkdefdasnqekiiqyhkngekyltsfl |
| | keeekekfnlekmqkiiqkteeedwllpetknnlfkfylltylllpyelkgdflgfvkkhyydiknvdfmdenqn |
| | niqvsqtvekqedyfyhkirlfekntkkyeivkysivpneklkqyfedlgidikyltgsvesgekwlgenlgidiky |
| | ltveqksevseeknkkvslknngmfnktillfvfkyyqiafklfndielyslfflreksekpfevfleelkdkmigkql |
| | nfgqllyvvyevlvknkdldkilskkidyrkdksfspeiaylrnflshlnyskfldnfmkintnksdenkevlipsiki |
| | qkmiqfiekcnlqnqidfdfnfvndlymrkekmffiqlkqifpdinstekqkksekeeilrkryhlinkkneqik |
| | deheaqsqlyekilslqkifscdknnfyrrlkeekllflekqgkkkismkeikdkiasdisdllgilkkeitrdikdklt |
| | ekfryceekllnisfynhqdkkkeegirvflirdknsdnfkfesilddgsnkifiskngkeitiqccdkvletlmiek |
| | ntlkissngkiisliphysysidvky |
| WP_0 | mekfrrqnrssiikiiisnydtkgikelkvryrkqaqldtfiikteivnndifiksiiekarekyrysflfdgeekyhfk |
| 35906 | nkssveivkkdifsqtpdnmirnykitlkiseknprvveaeiedlmnstilkdgrrsarreksmterklieekvae |
| 563 | nysllancpmeevdsikiykikrfltyrsnmllyfasinsflcegikgkdneteeiwhlkdndvrkekvkenfknk |
| | liqstenynsslknqieekekllrkeskkgafyrtiikklqqerikelseksltedcekiiklyselrhplmhydyqyf |
| | enlfenkenseltknlnldifkslplvrkmklnnkvnyledndtlfvlqktkkaktlyqiydalceqkngfnkfind |
| | ffvsdgeentvfkqiinekfqseieflekrisesekkneklkkkldsmkahfrninsedtkeayfwdihssrnykt |
| | kynerknlvneytellgsskekkllreeitkinrqllklkqemeeitkknslfrleykmkmafgflfcefdgnisrfk |
| | defdasnqekiiqyhkngekyltyflkeeekekfnlkklqetiqktgeenwllpqnknnlfkfylltylllpyelkg |
| | dflgfykkhyydiknvdfmdenqsskiieskeddlyhkirlfekntkkyeivkysivpdkklkqyfkdlgidtkyli |
| | ldqksevsgeknkkvslknngmfnktillfvfkyyqiafklfndielyslfflreksgkpfevflkelkdkmigkqlnf |
| | gqllyvvyevlvknkdlseilseridyrkdmcfsaeiadlrnflshnyskfldnfmkintnksdenkevlipsikiq |
| | kmikfieecnlqsqidfdfnfvndfymrkekmffiqlkqifpdinstekqkmnekeeilrnryhltdkkneqik |
| | deheaqsqlyekilslqkiyssdknnfygrlkeekllflekqekkklsmeeikdkiagdisdllgilkkeitrdikdkl |
| | tekfryceekllnlsfynhqdkkkeesirvflirdknsdnfkfesilddgsnkifiskngkeitiqccdkvletliiekn |
| | tlkissngkiisliphysysidvky |
| WP_0 | mksgrrekaksnkssivrviisnfddkqvkeikvlytkqggidvikfkstekdekgrmkfnfdcaynrleeeefn |
| 42678 | sfggkgkqsffvttnedltelhvtkrhkttgeiikdytiqgkytpikqdrtkvtvsitdnkdhfdsndlgdkirlsrsl |
| 931 | tqytnrilldadvmknyreivcsdsekvdetinidsqeiykinrflsyrsnmiiyyqminnfllhydgeedkggn |
| | dsinlineiwkyenkkndekekiiersyksieksinqyilnhntevesgdkekkidiseerikedlkktfilfsrlrh |
| | ymvhynykfyenlysgknfiiynkdksksrrfselldlnifkelskiklvknravsnyldkkttihvlnkninaiklldi |
| | yrdicetkngfnnfinnmmtisgeedkeykemvtkhfnenmnklsiylenfkkhsdfktnnkkketynllkq |
| | eldeqkklrlwfnapyvydihsskkykelyverkkyvdihsklieaginndnkkklneinvklcelntemkemt |
| | klnskyrlqyklqlafgfileefnldidkfvsafdkdnnltiskfmekretylsksldrrdnrfkklikdykfrdtedif |
| | csdrennlvklyilmyillpveirgdflgfvkknyydlkhvdfidkrnndnkdtffhdlrlfeknvkrlevtsyslsdg |
| | flgkksrekfgkelekfiyknvsialptnidikefnkslvlpmmknyqiifkllndieisalfliakkegnegsitfkkv |
| | idkvrkedmngninfsqvmkmalnekvncqirnsiahinmkqlyieplniyinnnqnkktiseqmeeiidici |
| | tkgltgkelnkniindyymkkeklvfnlklrkrnnlysidaqqknmkeksilnkydlnykdenlnikeiilkyndl |
| | nnkqkllkettegesnyknalskdilllngiirkninfkikemilgiiqqneyryvniniydkirkedhnidlkinnk |
| | yieiscyenksnestderinfkikymdlkvknellypscyediyikkkidleiryienckvvyidiyykkyninlefd |
| | gktlfvkfnkdvkknnqkvnlesnyiqnikfivs |
| WP_0 | mekfrrqnrnsiikiiisnydtkgikelkvryrkqaqldtfiikteivnndifiksiiekarekyrysflfdgeekyhfk |
| 62627 | nkssveivkkdifsqtpdnmirnykitlkiseknprvveaeiedlmnstilkdgrrsarreksvterklieekvae |
| 846 | nysllancpmeevdsikiykikrfltyrsnmllyfasinsflcegikgkeneteeiwhlkdndvrkekvkenfknk |
| | liqstenynsslknqieekekllrkeskkgafyrtiikklqqerikelseksltedcekiiklysklrhslmhydyqyf |
| | enlfenketpelkdkldlhlfkslplirkmklnnkvnyledgdtlfvlqktkkaktlyqiydalceqkngfnkfindf |
| | fvsdgeentvfkqiinekfqsemeflgkriseseeknpklkkkfdsmkahfhninsedtkeayfwdihsssny |
| | ktkynerknlvneytellgsskekkllreeitqinrkllklkqemeeitkknslfrleykmkmafgflfcefdgnisr |
| | fkdefdasnqekiiqyhkngekyltyflkeeekekfnlkklqetiqktgkenwllpqnknnlfkfylltylllpyelk |
| | gdflgfvkkhyydiknvdfmdenqsskiieskeddfyhkirlfekntkkyeivkysivpdeklkqyfkdlgidtky |
| | lileqksevsgeknkkvslknngmfnktillfvfkyyqiafklfndielyslfflreksgkpfevflkelkdkmigkql |
| | nfgqllyviyevlvknkdlseilseridyrkdmcfsaeiadlrnflshlnyskfldnfmkintnksdenkevlipsiki |
| | qkmikfieecnlqsqidfdfnfvndfymrkekmffiqlkqifpdinstekqkmnekeeilrnryhltdkkneqi |
| | kdeheaqsqlyekilslqkiyssdknnfygrlkeekllflgkqgkkklsmeeikdkiagdisdllgilkkeitrdikdk |
| | ltekfryceekllnlsfynhqdkkkeesirvflirdknsdnfkfesilddgsnkifiskngkeitiqccdkvletlmie |
| | kntlkissngkiislvphysysidvky |
| WP_0 | mekfrrqnrnsiikiiisnydtkgikelkvryrkqaqldtfiikteivnndifiksiiekarekyrysflfdgeekyhfk |
| 05959 | nkssveivkkdifsqtpdnmirnykitlkiseknprvveaeiedlmnstilkdgrrsarreksmterklieekvak |
| 231 | nysllancpmeevdsikiykikrfltyrsnmllyfasinsflcegikgkdneteeiwhlkdndvrkekvrenfknk |
| | liqstenynsslknqieekekllrkefkkgafyrtiikklqqerikelseksltedcekiiklysklrhslmhydyqyf |
| | enlfenkknddlmkdlnldlfkslplirkmklnnkvnyledgdtlfvlqktkkaktlyqiydalceqkngfnkfin |
| | dffvsdgeentvfkqiinekfqsemeflekrisesekkneklkkkldsmkahfrninsedtkeayfwdihssrn |
| | yktkynerknlyneytellgsskekkllreeitkinrqllklkqemeeitkknslfrleykmkiafgflfcefdgnisk |
| | fkdefdasnqekiiqyhkngekyltsflkeeekekfnlekmqkiiqkteeedwllpetknnlfkfylltylllpyel |
| | kgdflgfvkkhyydiknvdfidenqnniqvsqtvekqedyfyhkirlfekntkkyeivkysivpneklkqyfedl |
| | gidikyltveqksevseeknkkvslknngmfnktillfvfkyyqiafklfndielyslfflreksgkpleifrkelesk |
| | mkdgylnfgqllyvvyevlyknkdldkilskkidyrkdksfspeiaylrnflshlnyskfldnfmkintnksdenk |
| | evlipsikiqkmiqfiekcnlqnqidfdfnfvndlymrkekmffiqlkqifpdinstekqkmnekeeilrnryhlt |
| | dkkneqikdeheaqsqlyekilslqkiyssdknnfygrlkeekllflekqgkkklsmeeikdkiagdisdllgilkk |
| | eitrdikdkltekfryceekllnlsfynhqdkkkeesirvflirdknsdnfkfesilddgsnkifiskngkeitiqccdk |
| | vletliiekntlkissngkiisliphysysidvky |
| WP_0 | mgkpnrssiikiiisnydnkgikevkvrynkqaqldtflikselkdgkfilysivdkarekyrysfeidktninkneil |
| 27128 | iikkdiysnkedkvirkyilsfevsekndrtivtkikdcletqkkekferentrrliseterkllseetqktyskiaccs |
| 616 | pedidsvkiykikrylayrsnmllffslindifvkgvvkdngeevgeiwriidskeidekktydllvenfkkrmsqe |
| | finykqsienkiekntnkikeieqklkkekykkeinrlkkqlielnrendllekdkielsdeeirediekilkiysdlr |
| | hklmhynyqyfenlfenkkiskeknedvnltelldlnlfrylplyrqlklenktnylekedkitvlgvsdsaikyys |
| | yynflceqkngfnnfinsffsndgeenksfkekinlslekeieimeketnekikeinknelqlmkeqkelgtayv |
| | ldihslndykishnernknvklqndimngnrdknaldkinkklvelkikmdkitkrnsilrlkyklqvaygflme |
| | eykgnikkfkdefdiskekiksykskgekyleyksekkyitkilnsiedihnitwlknqeennlfklyvltyillpfef |
| | rgdflgfvkkhyydiknvefldenndrltpeqlekmkndsffnkirlfeknskkydilkesiltserigkyfsllntga |
| | kyfeyggeenrgifnkniiipifkyyqivlklyndvelamlltlsesdekdinkikelvtlkekvspkkidyekkykf |
| | svlldcfnriinlgkkdflaseevkevaktftnlaylrnkichlnyskfiddlltidtnksttdsegkllindrirklikfire |
| | nnqkmnisidynyindyymkkekfifgqrkqaktiidsgkkankrnkaeellkmyrvkkeninliyelskklne |
| | ltkselflldkkllkdidftdvkiknksffelkndvkevanikqalqkhsseligiykkevimaikrsivskliydeekv |
| | lsiiiydktnkkyedflleirrerdinkfqflidekkeklgyekiietkekkkvvvkiqnnselvsepriiknkdkkka |
| | ktpeeisklgildltnhycfnlkitl |
| WP_0 | mekfrrqnrnsiikiiisnydtkgikelkyryrkqaqldtfiikteivnndifiksiiekarekyrysflfdgeekyhfk |
| 62624 | nkssveivkkdifsqtpdnmirnykitlkiseknprvveaeiedlmnstilkdgrrsarreksmterklieekvak |
| 740 | nysllancpmeevdsikiykikrfltyrsnmllyfasinsflcegikgkdneteeiwhlkdndvrkekvrenfknk |
| | liqstenynsslknqieekekllrkefkkgafyrtiikklqqerikelseksltedcekiiklysklrhslmhydyqyf |
| | enlfenkknddlmkdlnldlfkslplirkmklnnkvnyledgdtlfvlqktkkaktlyqiydalceqkngfnkfin |
| | dffvsdgeentvfkqiinekfqsemeflekrisesekkneklkkkldsmkahfrninsedtkeayfwdihssrn |
| | yktkynerknlvneytellgsskekkllreeitkinrqllklkqemeeitkknslfrleykmkiafgflfcefdgnisk |
| | fkdefdasnqekiiqyhkngekyltsflkeeekekfnlekmqkiiqkteeedwllpetknnlfkfylltylllpyel |
| | kgdflgfvkkhyydiknvdfidenqnniqvsqtvekqedyfyhkirlfekntkkyeivkysivpneklkqyfedl |
| | gidikyltgsvesgekwlgenlgidikyltveqksevseeknkkvslknngmfnktillfvfkyyqiafklfndiely |
| | slfflreksgkpleifrkeleskmkdgylnfgqllyvvyevlvknkdldkilskkidyrkdksfspeiaylrnflshlny |
| | skfldnfmkintnksdenkevlipsikiqkmiqfiekcnlqnqidfdfnfvndlymrkekmffiqlkqifpdinst |
| | ekqkmnekeeilrnryhltdkkneqikdeheaqsqlyekilslqkiyssdknnfygrlkeekllflekqgkkkls |
| | meeikdkiagdisdlldllkkeitrdikdkltekfryceekllnlsfynhqdkkkeesirvflirdknsdnfkfesildd |
| | gsnkifiskngkeitiqccdkvletliiekntlkissngkiisliphysysidvky |
| WP_0 | menknkpnrgsivriiisnydmkgikelkyryrkqaqldtfilqttldksnnsilindfrvkarekyrysftydgke |
| 96402 | kfsvpsnsiivtkidnaapekskeirkykitlgidekcktgsmitaaiedlleddrvregirnprrkaskterklites |
| 050 | ichnyaqitqcpveeidavkiykykrflsyrsnmllffalindflcknlknekgekineiwemenkgnnkkidfd |
| | enynilvaqikeyftkeienynnridniidkkellkyseekeeseknkkleelnklesqklkiltdeeikadvikiiki |
| | fsdlrhslmhyeykyfenlfenkkneelaellnlnlfknltllrqmkienktnylegdekfnilgkdvraknalghy |
| | dllveqkngfnnfinsffvqdgtenlefkkfidenfikaqkeleediknckesvkklekklkenpkksedlekkle |
| | kkqkklkelkkelekmkqhykrlncayvwdihsstvykklynerknliekynkqlnglqdknaitginaqllrik |
| | kemeeitksnslfrlkykmqiayaflemeyegniakfknefdcsktekiqewlekseeylnycmekeedgkn |
| | ykfhfkeiseikdthneewlentsennlfkfyiltylllpmefkgdflgvvkkhyydiknvdftdesekelsqeqi |
| | dkmigdsffhkirlfekntkryeiikysiltsdeikkyfellelkvpyleykgideigifnkniilpifkyyqiifrlyndle |
| | ihglfnvsfdinkilsdlksygneninfreflyvikqnnnssteeeyqkiwekleskylkeplltpekkeinkktek |
| | elkkldgisflrnkishleyekiiegvlktavngenkktsetnadkvflnekikkiinfikeneldkielgfnfindff |
| | mkkeqfmfgqikqvkegnsdsitterkrkeennkrlkityglnynnlskiyefsntlreivnsplflkdstllkkvdl |
| | skymlkekpicslqyenntkleddikrillkdssdimgiykaevvkklkeklvlifkydeekkiyvtvydtskavp |
| | eniskeilvkrnnskeeyffednkkkyttqyytleitkenelkvipakklegkefktekkeenklmlnnhycfnv |
| | kiiy |

[0587] In some embodiments, the Cas13 protein is a Cas13d protein. Yan et al. Molecular Cell, 70, 327-339 (2018).

[0588] In some embodiments, the components of the AD-functionalized CRISPR-Cas system may be delivered in various form, such as combinations of DNA/RNA or RNA/RNA or protein RNA. For example, the Cas13 protein may be delivered as a DNA-coding polynucleotide or an RNA-coding polynucleotide or as a protein. The guide may be delivered may be delivered as a DNA-coding polynucleotide or an RNA. All possible combinations are envisioned, including mixed forms of delivery.

### Delivery

[0589] In some embodiments, the components of the CD-functionalized CRISPR-Cas system may be delivered in various form, such as combinations of DNA/RNA or RNA/RNA or protein RNA. For example, the Cas13 protein may be delivered as a DNA-coding polynucleotide or an RNA-coding polynucleotide or as a protein. The guide may be delivered may be delivered as a DNA-coding polynucleotide or an RNA. All possible combinations are envisioned, including mixed forms of delivery.

[0590] In some aspects, the invention provides methods comprising delivering one or more polynucleotides, such as or one or more vectors as described herein, one or more transcripts thereof, and/or one or proteins transcribed therefrom, to a host cell.

[0591] Vectors

[0592] In general, the term “vector” refers to a nucleic acid molecule capable of transporting another nucleic acid to which it has been linked. It is a replicon, such as a plasmid, phage, or cosmid, into which another DNA segment may be inserted so as to bring about the replication of the inserted segment. Generally, a vector is capable of replication when associated with the proper control elementsVectors include, but are not limited to, nucleic acid molecules that are single-stranded, double-stranded, or partially double-stranded; nucleic acid molecules that comprise one or more free ends, no free ends (e.g., circular); nucleic acid molecules that comprise DNA, RNA, or both; and other varieties of polynucleotides known in the art. One type of vector is a “plasmid,” which refers to a circular double stranded DNA loop into which additional DNA segments can be inserted, such as by standard molecular cloning techniques. Another type of vector is a viral vector, wherein virally-derived DNA or RNA sequences are present in the vector for packaging into a virus (e.g., retroviruses, replication defective retroviruses, adenoviruses, replication defective adenoviruses, and adeno-associated viruses). Viral vectors also include polynucleotides carried by a virus for transfection into a host cell. Certain vectors are capable of autonomous replication in a host cell into which they are introduced (e.g., bacterial vectors having a bacterial origin of replication and episomal mammalian vectors). Other vectors (e.g., non-episomal mammalian vectors) are integrated into the genome of a host cell upon introduction into the host cell, and thereby are replicated along with the host genome. Moreover, certain vectors are capable of directing the expression of genes to which they are operatively-linked. Such vectors are referred to herein as “expression vectors.” Vectors for and that result in expression in a eukaryotic cell can be referred to herein as “eukaryotic expression vectors.” Common expression vectors of utility in recombinant DNA techniques are often in the form of plasmids.

[0593] Recombinant expression vectors can comprise a nucleic acid of the invention in a form suitable for expression of the nucleic acid in a host cell, which means that the recombinant expression vectors include one or more regulatory elements, which may be selected on the basis of the host cells to be used for expression, that is operatively-linked to the nucleic acid sequence to be expressed. Within a recombinant expression vector, “operably linked” is intended to mean that the nucleotide sequence of interest is linked to the regulatory element(s) in a manner that allows for expression of the nucleotide sequence (e.g., in an in vitro transcription/translation system or in a host cell when the vector is introduced into the host cell). Advantageous vectors include lentiviruses and adeno-associated viruses, and types of such vectors can also be selected for targeting particular types of cells.

[0594] With regards to recombination and cloning methods, mention is made of U.S. patent application Ser. No. 10/815,730, published Sep. 2, 2004 as US 2004-0171156 A1, the contents of which are herein incorporated by reference in their entirety.

[0595] The term “regulatory element” is intended to include promoters, enhancers, internal ribosomal entry sites (IRES), and other expression control elements (e.g., transcription termination signals, such as polyadenylation signals and poly-U sequences). Such regulatory elements are described, for example, in Goeddel, GENE EXPRESSION TECHNOLOGY: METHODS IN ENZYMOLOGY 185, Academic Press, San Diego, Calif. (1990). Regulatory elements include those that direct constitutive expression of a nucleotide sequence in many types of host cell and those that direct expression of the nucleotide sequence only in certain host cells (e.g., tissue-specific regulatory sequences). A tissue-specific promoter may direct expression primarily in a desired tissue of interest, such as muscle, neuron, bone, skin, blood, specific organs (e.g., liver, pancreas), or particular cell types (e.g., lymphocytes). Regulatory elements may also direct expression in a temporal-dependent manner, such as in a cell-cycle dependent or developmental stage-dependent manner, which may or may not also be tissue or cell-type specific. In some embodiments, a vector comprises one or more pol III promoter (e.g., 1, 2, 3, 4, 5, or more pol III promoters), one or more pol II promoters (e.g., 1, 2, 3, 4, 5, or more pol II promoters), one or more pol I promoters (e.g., 1, 2, 3, 4, 5, or more pol I promoters), or combinations thereof. Examples of pol III promoters include, but are not limited to, U6 and H1 promoters. Examples of pol II promoters include, but are not limited to, the retroviral Rous sarcoma virus (RSV) LTR promoter (optionally with the RSV enhancer), the cytomegalovirus (CMV) promoter (optionally with the CMV enhancer) [see, e.g., Boshart et al, Cell, 41:521-530 (1985)], the SV40 promoter, the dihydrofolate reductase promoter, the β-actin promoter, the phosphoglycerol kinase (PGK) promoter, and the EF1α promoter. Also encompassed by the term “regulatory element” are enhancer elements, such as WPRE; CMV enhancers; the R-U5′ segment in LTR of HTLV-I (Mol. Cell. Biol., Vol. 8(1), p. 466-472, 1988); SV40 enhancer; and the intron sequence between exons 2 and 3 of rabbit β-globin (Proc. Natl. Acad. Sci. USA., Vol. 78(3), p. 1527-31, 1981). It will be appreciated by those skilled in the art that the design of the expression vector can depend on such factors as the choice of the host cell to be transformed, the level of expression desired, etc. A vector can be introduced into host cells to thereby produce transcripts, proteins, or peptides, including fusion proteins or peptides, encoded by nucleic acids as described herein (e.g., clustered regularly interspersed short palindromic repeats (CRISPR) transcripts, proteins, enzymes, mutant forms thereof, fusion proteins thereof, etc.). With regards to regulatory sequences, mention is made of U.S. patent application Ser. No. 10/491,026, the contents of which are incorporated by reference herein in their entirety. With regards to promoters, mention is made of PCT publication WO 2011/028929 and U.S. application Ser. No. 12/511,940, the contents of which are incorporated by reference herein in their entirety.

[0596] Advantageous vectors include lentiviruses and adeno-associated viruses, and types of such vectors can also be selected for targeting particular types of cells.

[0597] In particular embodiments, use is made of bicistronic vectors for the guide RNA and (optionally modified or mutated) the CRISPR-Cas protein fused to cytidine deaminase. Bicistronic expression vectors for guide RNA and (optionally modified or mutated) CRISPR-Cas protein fused to cytidine deaminase are preferred. In general and particularly in this embodiment, (optionally modified or mutated) CRISPR-Cas protein fused to cytidine deaminase is preferably driven by the CBh promoter. The RNA may preferably be driven by a Pol III promoter, such as a U6 promoter. Ideally the two are combined.

[0598] Vectors can be designed for expression of CRISPR transcripts (e.g. nucleic acid transcripts, proteins, or enzymes) in prokaryotic or eukaryotic cells. For example, CRISPR transcripts can be expressed in bacterial cells such as Escherichia coli, insect cells (using baculovirus expression vectors), yeast cells, or mammalian cells. Suitable host cells are discussed further in Goeddel, GENE EXPRESSION TECHNOLOGY: METHODS IN ENZYMOLOGY 185, Academic Press, San Diego, Calif. (1990). Alternatively, the recombinant expression vector can be transcribed and translated in vitro, for example using T7 promoter regulatory sequences and T7 polymerase.

[0599] Vectors may be introduced and propagated in a prokaryote or prokaryotic cell. In some embodiments, a prokaryote is used to amplify copies of a vector to be introduced into a eukaryotic cell or as an intermediate vector in the production of a vector to be introduced into a eukaryotic cell (e.g. amplifying a plasmid as part of a viral vector packaging system). In some embodiments, a prokaryote is used to amplify copies of a vector and express one or more nucleic acids, such as to provide a source of one or more proteins for delivery to a host cell or host organism. Expression of proteins in prokaryotes is most often carried out in Escherichia coli with vectors containing constitutive or inducible promoters directing the expression of either fusion or non-fusion proteins. Fusion vectors add a number of amino acids to a protein encoded therein, such as to the amino terminus of the recombinant protein. Such fusion vectors may serve one or more purposes, such as: (i) to increase expression of recombinant protein; (ii) to increase the solubility of the recombinant protein; and (iii) to aid in the purification of the recombinant protein by acting as a ligand in affinity purification. Often, in fusion expression vectors, a proteolytic cleavage site is introduced at the junction of the fusion moiety and the recombinant protein to enable separation of the recombinant protein from the fusion moiety subsequent to purification of the fusion protein. Such enzymes, and their cognate recognition sequences, include Factor Xa, thrombin and enterokinase. Example fusion expression vectors include pGEX (Pharmacia Biotech Inc; Smith and Johnson, 1988. Gene 67: 31-40), pMAL (New England Biolabs, Beverly, Mass.) and pRIT5 (Pharmacia, Piscataway, N.J.) that fuse glutathione S-transferase (GST), maltose E binding protein, or protein A, respectively, to the target recombinant protein. Examples of suitable inducible non-fusion E. coli expression vectors include pTrc (Amrann et al., (1988) Gene 69:301-315) and pET 11d (Studier et al., GENE EXPRESSION TECHNOLOGY: METHODS IN ENZYMOLOGY 185, Academic Press, San Diego, Calif. (1990) 60-89). In some embodiments, a vector is a yeast expression vector. Examples of vectors for expression in yeast Saccharomyces cerivisae include pYepSec1 (Baldari, et al., 1987. EMBO J. 6: 229-234), pMFa (Kuijan and Herskowitz, 1982. Cell 30: 933-943), pJRY88 (Schultz et al., 1987. Gene 54: 113-123), pYES2 (Invitrogen Corporation, San Diego, Calif.), and picZ (InVitrogen Corp, San Diego, Calif.). In some embodiments, a vector drives protein expression in insect cells using baculovirus expression vectors. Baculovirus vectors available for expression of proteins in cultured insect cells (e.g., SF9 cells) include the pAc series (Smith, et al., 1983. Mol. Cell. Biol. 3: 2156-2165) and the pVL series (Lucklow and Summers, 1989. Virology 170: 31-39).

[0600] In some embodiments, a vector is capable of driving expression of one or more sequences in mammalian cells using a mammalian expression vector. Examples of mammalian expression vectors include pCDM8 (Seed, 1987. Nature 329: 840) and pMT2PC (Kaufman, et al., 1987. EMBO J. 6: 187-195). When used in mammalian cells, the expression vector's control functions are typically provided by one or more regulatory elements. For example, commonly used promoters are derived from polyoma, adenovirus 2, cytomegalovirus, simian virus 40, and others disclosed herein and known in the art. For other suitable expression systems for both prokaryotic and eukaryotic cells see, e.g., Chapters 16 and 17 of Sambrook, et al., MOLECULAR CLONING: A LABORATORY MANUAL. 2nd ed., Cold Spring Harbor Laboratory, Cold Spring Harbor Laboratory Press, Cold Spring Harbor, N.Y., 1989.

[0601] In some embodiments, the recombinant mammalian expression vector is capable of directing expression of the nucleic acid preferentially in a particular cell type (e.g., tissue-specific regulatory elements are used to express the nucleic acid). Tissue-specific regulatory elements are known in the art. Non-limiting examples of suitable tissue-specific promoters include the albumin promoter (liver-specific; Pinkert, et al., 1987. Genes Dev. 1: 268-277), lymphoid-specific promoters (Calame and Eaton, 1988. Adv. Immunol. 43: 235-275), in particular promoters of T cell receptors (Winoto and Baltimore, 1989. EMBO J. 8: 729-733) and immunoglobulins (Baneiji, et al., 1983. Cell 33: 729-740; Queen and Baltimore, 1983. Cell 33: 741-748), neuron-specific promoters (e.g., the neurofilament promoter; Byrne and Ruddle, 1989. Proc. Natl. Acad. Sci. USA 86: 5473-5477), pancreas-specific promoters (Edlund, et al., 1985. Science 230: 912-916), and mammary gland-specific promoters (e.g., milk whey promoter; U.S. Pat. No. 4,873,316 and European Application Publication No. 264,166). Developmentally-regulated promoters are also encompassed, e.g., the murine hox promoters (Kessel and Gruss, 1990. Science 249: 374-379) and the α-fetoprotein promoter (Campes and Tilghman, 1989. Genes Dev. 3: 537-546). With regards to these prokaryotic and eukaryotic vectors, mention is made of U.S. Pat. No. 6,750,059, the contents of which are incorporated by reference herein in their entirety. Other embodiments of the invention may relate to the use of viral vectors, with regards to which mention is made of U.S. patent application Ser. No. 13/092,085, the contents of which are incorporated by reference herein in their entirety. Tissue-specific regulatory elements are known in the art and in this regard, mention is made of U.S. Pat. No. 7,776,321, the contents of which are incorporated by reference herein in their entirety. In some embodiments, a regulatory element is operably linked to one or more elements of a CRISPR system so as to drive expression of the one or more elements of the CRISPR system.

[0602] In some embodiments, one or more vectors driving expression of one or more elements of a nucleic acid-targeting system are introduced into a host cell such that expression of the elements of the nucleic acid-targeting system direct formation of a nucleic acid-targeting complex at one or more target sites. For example, a nucleic acid-targeting effector enzyme and a nucleic acid-targeting guide RNA could each be operably linked to separate regulatory elements on separate vectors. RNA(s) of the nucleic acid-targeting system can be delivered to a transgenic nucleic acid-targeting effector protein animal or mammal, e.g., an animal or mammal that constitutively or inducibly or conditionally expresses nucleic acid-targeting effector protein; or an animal or mammal that is otherwise expressing nucleic acid-targeting effector proteins or has cells containing nucleic acid-targeting effector proteins, such as by way of prior administration thereto of a vector or vectors that code for and express in vivo nucleic acid-targeting effector proteins. Alternatively, two or more of the elements expressed from the same or different regulatory elements, may be combined in a single vector, with one or more additional vectors providing any components of the nucleic acid-targeting system not included in the first vector. nucleic acid-targeting system elements that are combined in a single vector may be arranged in any suitable orientation, such as one element located 5′ with respect to (“upstream” of) or 3′ with respect to (“downstream” of) a second element. The coding sequence of one element may be located on the same or opposite strand of the coding sequence of a second element, and oriented in the same or opposite direction. In some embodiments, a single promoter drives expression of a transcript encoding a nucleic acid-targeting effector protein and the nucleic acid-targeting guide RNA, embedded within one or more intron sequences (e.g., each in a different intron, two or more in at least one intron, or all in a single intron). In some embodiments, the nucleic acid-targeting effector protein and the nucleic acid-targeting guide RNA may be operably linked to and expressed from the same promoter. Delivery vehicles, vectors, particles, nanoparticles, formulations and components thereof for expression of one or more elements of a nucleic acid-targeting system are as used in the foregoing documents, such as WO 2014/093622 (PCT/US2013/074667). In some embodiments, a vector comprises one or more insertion sites, such as a restriction endonuclease recognition sequence (also referred to as a “cloning site”). In some embodiments, one or more insertion sites (e.g., about or more than about 1, 2, 3, 4, 5, 6, 7, 8, 9, 10, or more insertion sites) are located upstream and/or downstream of one or more sequence elements of one or more vectors. When multiple different guide sequences are used, a single expression construct may be used to target nucleic acid-targeting activity to multiple different, corresponding target sequences within a cell. For example, a single vector may comprise about or more than about 1, 2, 3, 4, 5, 6, 7, 8, 9, 10, 15, 20, or more guide sequences. In some embodiments, about or more than about 1, 2, 3, 4, 5, 6, 7, 8, 9, 10, or more such guide-sequence-containing vectors may be provided, and optionally delivered to a cell. In some embodiments, a vector comprises a regulatory element operably linked to an enzyme-coding sequence encoding a a nucleic acid-targeting effector protein. Nucleic acid-targeting effector protein or nucleic acid-targeting guide RNA or RNA(s) can be delivered separately; and advantageously at least one of these is delivered via a particle complex. nucleic acid-targeting effector protein mRNA can be delivered prior to the nucleic acid-targeting guide RNA to give time for nucleic acid-targeting effector protein to be expressed. Nucleic acid-targeting effector protein mRNA might be administered 1-12 hours (preferably around 2-6 hours) prior to the administration of nucleic acid-targeting guide RNA. Alternatively, nucleic acid-targeting effector protein mRNA and nucleic acid-targeting guide RNA can be administered together. Advantageously, a second booster dose of guide RNA can be administered 1-12 hours (preferably around 2-6 hours) after the initial administration of nucleic acid-targeting effector protein mRNA+guide RNA. Additional administrations of nucleic acid-targeting effector protein mRNA and/or guide RNA might be useful to achieve the most efficient levels of genome modification.

[0603] Conventional viral and non-viral based gene transfer methods can be used to introduce nucleic acids in mammalian cells or target tissues. Such methods can be used to administer nucleic acids encoding components of a nucleic acid-targeting system to cells in culture, or in a host organism. Non-viral vector delivery systems include DNA plasmids, RNA (e.g. a transcript of a vector described herein), naked nucleic acid, and nucleic acid complexed with a delivery vehicle, such as a liposome. Viral vector delivery systems include DNA and RNA viruses, which have either episomal or integrated genomes after delivery to the cell. For a review of gene therapy procedures, see Anderson, Science 256:808-813 (1992); Nabel & Felgner, TIBTECH 11:211-217 (1993); Mitani & Caskey, TIBTECH 11:162-166 (1993); Dillon, TIBTECH 11:167-175 (1993); Miller, Nature 357:455-460 (1992); Van Brunt, Biotechnology 6(10):1149-1154 (1988); Vigne, Restorative Neurology and Neuroscience 8:35-36 (1995); Kremer & Perricaudet, British Medical Bulletin 51(1):31-44 (1995); Haddada et al., in Current Topics in Microbiology and Immunology, Doerfler and Böhm (eds) (1995); and Yu et al., Gene Therapy 1:13-26 (1994).

[0604] Methods of non-viral delivery of nucleic acids include lipofection, nucleofection, microinjection, biolistics, virosomes, liposomes, immunoliposomes, polycation or lipid:nucleic acid conjugates, naked DNA, artificial virions, and agent-enhanced uptake of DNA. Lipofection is described in e.g., U.S. Pat. Nos. 5,049,386, 4,946,787; and 4,897,355) and lipofection reagents are sold commercially (e.g., Transfectam™ and Lipofectin™). Cationic and neutral lipids that are suitable for efficient receptor-recognition lipofection of polynucleotides include those of Felgner, WO 91/17424; WO 91/16024. Delivery can be to cells (e.g. in vitro or ex vivo administration) or target tissues (e.g. in vivo administration).

[0605] Plasmid delivery involves the cloning of a guide RNA into a CRISPR-Cas protein expressing plasmid and transfecting the DNA in cell culture. Plasmid backbones are available commercially and no specific equipment is required. They have the advantage of being modular, capable of carrying different sizes of CRISPR-Cas coding sequences (including those encoding larger sized proteins) as well as selection markers. Both an advantage of plasmids is that they can ensure transient, but sustained expression. However, delivery of plasmids is not straightforward such that in vivo efficiency is often low. The sustained expression can also be disadvantageous in that it can increase off-target editing. In addition excess build-up of the CRISPR-Cas protein can be toxic to the cells. Finally, plasmids always hold the risk of random integration of the dsDNA in the host genome, more particularly in view of the double-stranded breaks being generated (on and off-target).

[0606] The preparation of lipid:nucleic acid complexes, including targeted liposomes such as immunolipid complexes, is well known to one of skill in the art (see, e.g., Crystal, Science 270:404-410 (1995); Blaese et al., Cancer Gene Ther. 2:291-297 (1995); Behr et al., Bioconjugate Chem. 5:382-389 (1994); Remy et al., Bioconjugate Chem. 5:647-654 (1994); Gao et al., Gene Therapy 2:710-722 (1995); Ahmad et al., Cancer Res. 52:4817-4820 (1992); U.S. Pat. Nos. 4,186,183, 4,217,344, 4,235,871, 4,261,975, 4,485,054, 4,501,728, 4,774,085, 4,837,028, and 4,946,787). This is discussed more in detail below.

[0607] The use of RNA or DNA viral based systems for the delivery of nucleic acids takes advantage of highly evolved processes for targeting a virus to specific cells in the body and trafficking the viral payload to the nucleus. Viral vectors can be administered directly to patients (in vivo) or they can be used to treat cells in vitro, and the modified cells may optionally be administered to patients (ex vivo). Conventional viral based systems could include retroviral, lentivirus, adenoviral, adeno-associated and herpes simplex virus vectors for gene transfer. Integration in the host genome is possible with the retrovirus, lentivirus, and adeno-associated virus gene transfer methods, often resulting in long term expression of the inserted transgene. Additionally, high transduction efficiencies have been observed in many different cell types and target tissues.

[0608] The tropism of a retrovirus can be altered by incorporating foreign envelope proteins, expanding the potential target population of target cells. Lentiviral vectors are retroviral vectors that are able to transduce or infect non-dividing cells and typically produce high viral titers. Selection of a retroviral gene transfer system would therefore depend on the target tissue. Retroviral vectors are comprised of cis-acting long terminal repeats with packaging capacity for up to 6-10 kb of foreign sequence. The minimum cis-acting LTRs are sufficient for replication and packaging of the vectors, which are then used to integrate the therapeutic gene into the target cell to provide permanent transgene expression. Widely used retroviral vectors include those based upon murine leukemia virus (MuLV), gibbon ape leukemia virus (GaLV), Simian Immuno deficiency virus (SIV), human immuno deficiency virus (HIV), and combinations thereof (see, e.g., Buchscher et al., J. Virol. 66:2731-2739 (1992); Johann et al., J. Virol. 66:1635-1640 (1992); Sommnerfelt et al., Virol. 176:58-59 (1990); Wilson et al., J. Virol. 63:2374-2378 (1989); Miller et al., J. Virol. 65:2220-2224 (1991); PCT/US94/05700).

[0609] In applications where transient expression is preferred, adenoviral based systems may be used. Adenoviral based vectors are capable of very high transduction efficiency in many cell types and do not require cell division. With such vectors, high titer and levels of expression have been obtained. This vector can be produced in large quantities in a relatively simple system. Adeno-associated virus (“AAV”) vectors may also be used to transduce cells with target nucleic acids, e.g., in the in vitro production of nucleic acids and peptides, and for in vivo and ex vivo gene therapy procedures (see, e.g., West et al., Virology 160:38-47 (1987); U.S. Pat. No. 4,797,368; WO 93/24641; Kotin, Human Gene Therapy 5:793-801 (1994); Muzyczka, J. Clin. Invest. 94:1351 (1994). Construction of recombinant AAV vectors are described in a number of publications, including U.S. Pat. No. 5,173,414; Tratschin et al., Mol. Cell. Biol. 5:3251-3260 (1985); Tratschin, et al., Mol. Cell. Biol. 4:2072-2081 (1984); Hermonat & Muzyczka, PNAS 81:6466-6470 (1984); and Samulski et al., J. Virol. 63:03822-3828 (1989).

[0610] The invention provides AAV that contains or consists essentially of an exogenous nucleic acid molecule encoding a CRISPR system, e.g., a plurality of cassettes comprising or consisting a first cassette comprising or consisting essentially of a promoter, a nucleic acid molecule encoding a CRISPR-associated (Cas) protein (putative nuclease or helicase proteins), e.g., Cas13 and a terminator, and one or more, advantageously up to the packaging size limit of the vector, e.g., in total (including the first cassette) five, cassettes comprising or consisting essentially of a promoter, nucleic acid molecule encoding guide RNA (gRNA) and a terminator (e.g., each cassette schematically represented as Promoter-gRNA1-terminator, Promoter-gRNA2-terminator Promoter-gRNA(N)-terminator, where N is a number that can be inserted that is at an upper limit of the packaging size limit of the vector), or two or more individual rAAVs, each containing one or more than one cassette of a CRISPR system, e.g., a first rAAV containing the first cassette comprising or consisting essentially of a promoter, a nucleic acid molecule encoding Cas, e.g., Cas (Cas13) and a terminator, and a second rAAV containing one or more cassettes each comprising or consisting essentially of a promoter, nucleic acid molecule encoding guide RNA (gRNA) and a terminator (e.g., each cassette schematically represented as Promoter-gRNA1-terminator, Promoter-gRNA2-terminator Promoter-gRNA(N)-terminator, where N is a number that can be inserted that is at an upper limit of the packaging size limit of the vector). Alternatively, because Cas13 can process its own crRNA/gRNA, a single crRNA/gRNA array can be used for multiplex gene editing. Hence, instead of including multiple cassettes to deliver the gRNAs, the rAAV may contain a single cassette comprising or consisting essentially of a promoter, a plurality of crRNA/gRNA, and a terminator (e.g., schematically represented as Promoter-gRNA1-gRNA2 . . . gRNA(N)-terminator, where N is a number that can be inserted that is at an upper limit of the packaging size limit of the vector). See Zetsche et al Nature Biotechnology 35, 31-34 (2017), which is incorporated herein by reference in its entirety. As rAAV is a DNA virus, the nucleic acid molecules in the herein discussion concerning AAV or rAAV are advantageously DNA. The promoter is in some embodiments advantageously human Synapsin I promoter (hSyn). Additional methods for the delivery of nucleic acids to cells are known to those skilled in the art. See, for example, US20030087817, incorporated herein by reference.

[0611] In another embodiment, Cocal vesiculovirus envelope pseudotyped retroviral vector particles are contemplated (see, e.g., US Patent Publication No. 20120164118 assigned to the Fred Hutchinson Cancer Research Center). Cocal virus is in the Vesiculovirus genus, and is a causative agent of vesicular stomatitis in mammals. Cocal virus was originally isolated from mites in Trinidad (Jonkers et al., Am. J. Vet. Res. 25:236-242 (1964)), and infections have been identified in Trinidad, Brazil, and Argentina from insects, cattle, and horses. Many of the vesiculoviruses that infect mammals have been isolated from naturally infected arthropods, suggesting that they are vector-borne. Antibodies to vesiculoviruses are common among people living in rural areas where the viruses are endemic and laboratory-acquired; infections in humans usually result in influenza-like symptoms. The Cocal virus envelope glycoprotein shares 71.5% identity at the amino acid level with VSV-G Indiana, and phylogenetic comparison of the envelope gene of vesiculoviruses shows that Cocal virus is serologically distinct from, but most closely related to, VSV-G Indiana strains among the vesiculoviruses. Jonkers et al., Am. J. Vet. Res. 25:236-242 (1964) and Travassos da Rosa et al., Am. J. Tropical Med. & Hygiene 33:999-1006 (1984). The Cocal vesiculovirus envelope pseudotyped retroviral vector particles may include for example, lentiviral, alpharetroviral, betaretroviral, gammaretroviral, deltaretroviral, and epsilonretroviral vector particles that may comprise retroviral Gag, Pol, and/or one or more accessory protein(s) and a Cocal vesiculovirus envelope protein. Within certain aspects of these embodiments, the Gag, Pol, and accessory proteins are lentiviral and/or gammaretroviral.

[0612] In some embodiments, a host cell is transiently or non-transiently transfected with one or more vectors described herein. In some embodiments, a cell is transfected as it naturally occurs in a subject optionally to be reintroduced therein. In some embodiments, a cell that is transfected is taken from a subject. In some embodiments, the cell is derived from cells taken from a subject, such as a cell line. A wide variety of cell lines for tissue culture are known in the art. Examples of cell lines include, but are not limited to, C8161, CCRF-CEM, MOLT, mIMCD-3, NHDF, HeLa-S3, Huhl, Huh4, Huh7, HUVEC, HASMC, HEKn, HEKa, MiaPaCell, Pancl, PC-3, TF1, CTLL-2, C1R, Rath, CV1, RPTE, A10, T24, J82, A375, ARH-77, Calul, SW480, SW620, SKOV3, SK-UT, CaCo2, P388D1, SEM-K2, WEHI-231, HB56, TIB55, Jurkat, J45.01, LRMB, Bc1-1, BC-3, IC21, DLD2, Raw264.7, NRK, NRK-52E, MRCS, MEF, Hep G2, HeLa B, HeLa T4, COS, COS-1, COS-6, COS-M6A, BS-C-1 monkey kidney epithelial, BALB/3T3 mouse embryo fibroblast, 3T3 Swiss, 3T3-L1, 132-d5 human fetal fibroblasts; 10.1 mouse fibroblasts, 293-T, 3T3, 721, 9L, A2780, A2780ADR, A2780cis, A172, A20, A253, A431, A-549, ALC, B16, B35, BCP-1 cells, BEAS-2B, bEnd.3, BHK-21, BR 293, BxPC3, C3H-10T1/2, C6/36, Cal-27, CHO, CHO-7, CHO-IR, CHO-K1, CHO-K2, CHO-T, CHO Dhfr −/−, COR-L23, COR-L23/CPR, COR-L23/5010, COR-L23/R23, COS-7, COV-434, CML T1, CMT, CT26, D17, DH82, DU145, DuCaP, EL4, EM2, EM3, EMT6/AR1, EMT6/AR10.0, FM3, H1299, H69, HB54, HB55, HCA2, HEK-293, HeLa, Hepalc1c7, HL-60, HMEC, HT-29, Jurkat, JY cells, K562 cells, Ku812, KCL22, KG1, KYO1, LNCap, Ma-Mel 1-48, MC-38, MCF-7, MCF-10A, MDA-MB-231, MDA-MB-468, MDA-MB-435, MDCK II, MDCK II, MOR/0.2R, MONO-MAC 6, MTD-1A, MyEnd, NCI-H69/CPR, NCI-H69/LX10, NCI-H69/LX20, NCI-H69/LX4, NIH-3T3, NALM-1, NW-145, OPCN/OPCT cell lines, Peer, PNT-1A/PNT 2, RenCa, RIN-5F, RMA/RMAS, Saos-2 cells, Sf-9, SkBr3, T2, T-47D, T84, THP1 cell line, U373, U87, U937, VCaP, Vero cells, WM39, WT-49, X63, YAC-1, YAR, and transgenic varieties thereof. Cell lines are available from a variety of sources known to those with skill in the art (see, e.g., the American Type Culture Collection (ATCC) (Manassas, Va.)).

[0613] In particular embodiments, transient expression and/or presence of one or more of the components of the CD-functionalized CRISPR system can be of interest, such as to reduce off-target effects. In some embodiments, a cell transfected with one or more vectors described herein is used to establish a new cell line comprising one or more vector-derived sequences. In some embodiments, a cell transiently transfected with the components of a CD-functionalized CRISPR system as described herein (such as by transient transfection of one or more vectors, or transfection with RNA), and modified through the activity of a CRISPR complex, is used to establish a new cell line comprising cells containing the modification but lacking any other exogenous sequence. In some embodiments, cells transiently or non-transiently transfected with one or more vectors described herein, or cell lines derived from such cells are used in assessing one or more test compounds.

[0614] In some embodiments it is envisaged to introduce the RNA and/or protein directly to the host cell. For instance, the CRISPR-Cas protein can be delivered as encoding mRNA together with an in vitro transcribed guide RNA. Such methods can reduce the time to ensure effect of the CRISPR-Cas protein and further prevents long-term expression of the CRISPR system components.

[0615] In some embodiments the RNA molecules of the invention are delivered in liposome or lipofectin formulations and the like and can be prepared by methods well known to those skilled in the art. Such methods are described, for example, in U.S. Pat. Nos. 5,593,972, 5,589,466, and 5,580,859, which are herein incorporated by reference. Delivery systems aimed specifically at the enhanced and improved delivery of siRNA into mammalian cells have been developed, (see, for example, Shen et al FEBS Let. 2003, 539:111-114; Xia et al., Nat. Biotech. 2002, 20:1006-1010; Reich et al., Mol. Vision. 2003, 9: 210-216; Sorensen et al., J. Mol. Biol. 2003, 327: 761-766; Lewis et al., Nat. Gen. 2002, 32: 107-108 and Simeoni et al., NAR 2003, 31, 11: 2717-2724) and may be applied to the present invention. siRNA has recently been successfully used for inhibition of gene expression in primates (see for example. Tolentino et al., Retina 24(4):660 which may also be applied to the present invention.

[0616] Indeed, RNA delivery is a useful method of in vivo delivery. It is possible to deliver Cas13, cytidine deaminase, and guide RNA into cells using liposomes or nanoparticles. Thus delivery of the CRISPR-Cas protein, such as a Cas13, the delivery of the cytidine deaminase (which may be fused to the CRISPR-Cas protein or an adaptor protein), and/or delivery of the RNAs of the invention may be in RNA form and via microvesicles, liposomes or particle or particles. For example, Cas13 mRNA, cytidine deaminase mRNA, and guide RNA can be packaged into liposomal particles for delivery in vivo. Liposomal transfection reagents such as lipofectamine from Life Technologies and other reagents on the market can effectively deliver RNA molecules into the liver.

[0617] Means of delivery of RNA also preferred include delivery of RNA via particles (Cho, S., Goldberg, M., Son, S., Xu, Q., Yang, F., Mei, Y., Bogatyrev, S., Langer, R. and Anderson, D., Lipid-like nanoparticles for small interfering RNA delivery to endothelial cells, Advanced Functional Materials, 19: 3112-3118, 2010) or exosomes (Schroeder, A., Levins, C., Cortez, C., Langer, R., and Anderson, D., Lipid-based nanotherapeutics for siRNA delivery, Journal of Internal Medicine, 267: 9-21, 2010, PMID: 20059641). Indeed, exosomes have been shown to be particularly useful in delivery siRNA, a system with some parallels to the CRISPR system. For instance, El-Andaloussi S, et al. (“Exosome-mediated delivery of siRNA in vitro and in vivo.” Nat Protoc. 2012 December; 7(12):2112-26. doi: 10.1038/nprot.2012.131. Epub 2012 Nov. 15.) describe how exosomes are promising tools for drug delivery across different biological barriers and can be harnessed for delivery of siRNA in vitro and in vivo. Their approach is to generate targeted exosomes through transfection of an expression vector, comprising an exosomal protein fused with a peptide ligand. The exosomes are then purify and characterized from transfected cell supernatant, then RNA is loaded into the exosomes. Delivery or administration according to the invention can be performed with exosomes, in particular but not limited to the brain. Vitamin E (α-tocopherol) may be conjugated with CRISPR Cas and delivered to the brain along with high density lipoprotein (HDL), for example in a similar manner as was done by Uno et al. (HUMAN GENE THERAPY 22:711-719 (June 2011)) for delivering short-interfering RNA (siRNA) to the brain. Mice were infused via Osmotic minipumps (model 1007D; Alzet, Cupertino, Calif.) filled with phosphate-buffered saline (PBS) or free TocsiBACE or Toc-siBACE/HDL and connected with Brain Infusion Kit 3 (Alzet). A brain-infusion cannula was placed about 0.5 mm posterior to the bregma at midline for infusion into the dorsal third ventricle. Uno et al. found that as little as 3 nmol of Toc-siRNA with HDL could induce a target reduction in comparable degree by the same ICV infusion method. A similar dosage of CRISPR Cas conjugated to α-tocopherol and co-administered with HDL targeted to the brain may be contemplated for humans in the present invention, for example, about 3 nmol to about 3 μmol of CRISPR Cas targeted to the brain may be contemplated. Zou et al. ((HUMAN GENE THERAPY 22:465-475 (April 2011)) describes a method of lentiviral-mediated delivery of short-hairpin RNAs targeting PKCγ for in vivo gene silencing in the spinal cord of rats. Zou et al. administered about 10 μl of a recombinant lentivirus having a titer of 1×10⁹ transducing units (TU)/ml by an intrathecal catheter. A similar dosage of CRISPR Cas expressed in a lentiviral vector targeted to the brain may be contemplated for humans in the present invention, for example, about 10-50 ml of CRISPR Cas targeted to the brain in a lentivirus having a titer of 1×10⁹ transducing units (TU)/ml may be contemplated.

### Dosage of Vectors

[0618] In some embodiments, the vector, e.g., plasmid or viral vector is delivered to the tissue of interest by, for example, an intramuscular injection, while other times the delivery is via intravenous, transdermal, intranasal, oral, mucosal, or other delivery methods. Such delivery may be either via a single dose, or multiple doses. One skilled in the art understands that the actual dosage to be delivered herein may vary greatly depending upon a variety of factors, such as the vector choice, the target cell, organism, or tissue, the general condition of the subject to be treated, the degree of transformation/modification sought, the administration route, the administration mode, the type of transformation/modification sought, etc.

[0619] Such a dosage may further contain, for example, a carrier (water, saline, ethanol, glycerol, lactose, sucrose, calcium phosphate, gelatin, dextran, agar, pectin, peanut oil, sesame oil, etc.), a diluent, a pharmaceutically-acceptable carrier (e.g., phosphate-buffered saline), a pharmaceutically-acceptable excipient, and/or other compounds known in the art. The dosage may further contain one or more pharmaceutically acceptable salts such as, for example, a mineral acid salt such as a hydrochloride, a hydrobromide, a phosphate, a sulfate, etc.; and the salts of organic acids such as acetates, propionates, malonates, benzoates, etc. Additionally, auxiliary substances, such as wetting or emulsifying agents, pH buffering substances, gels or gelling materials, flavorings, colorants, microspheres, polymers, suspension agents, etc. may also be present herein. In addition, one or more other conventional pharmaceutical ingredients, such as preservatives, humectants, suspending agents, surfactants, antioxidants, anticaking agents, fillers, chelating agents, coating agents, chemical stabilizers, etc. may also be present, especially if the dosage form is a reconstitutable form. Suitable exemplary ingredients include microcrystalline cellulose, carboxymethylcellulose sodium, polysorbate 80, phenylethyl alcohol, chlorobutanol, potassium sorbate, sorbic acid, sulfur dioxide, propyl gallate, the parabens, ethyl vanillin, glycerin, phenol, parachlorophenol, gelatin, albumin and a combination thereof. A thorough discussion of pharmaceutically acceptable excipients is available in REMINGTON'S PHARMACEUTICAL SCIENCES (Mack Pub. Co., N.J. 1991) which is incorporated by reference herein.

[0620] In an embodiment herein the delivery is via an adenovirus, which may be at a single booster dose containing at least 1×10⁵ particles (also referred to as particle units, pu) of adenoviral vector. In an embodiment herein, the dose preferably is at least about 1×10⁶ particles (for example, about 1×10⁶-1×10¹² particles), more preferably at least about 1×10⁷ particles, more preferably at least about 1×10⁸ particles (e.g., about 1×10⁸-1×10¹¹ particles or about 1×10⁸-1×10¹² particles), and most preferably at least about 1×10⁰ particles (e.g., about 1×10⁹-1×10¹⁰ particles or about 1×10⁹-1×10¹² particles), or even at least about 1×10¹⁰ particles (e.g., about 1×10¹⁰-1×10¹² particles) of the adenoviral vector. Alternatively, the dose comprises no more than about 1×10¹⁴ particles, preferably no more than about 1×10¹³ particles, even more preferably no more than about 1×10¹² particles, even more preferably no more than about 1×10¹¹ particles, and most preferably no more than about 1×10¹⁰ particles (e.g., no more than about 1×10⁹ articles). Thus, the dose may contain a single dose of adenoviral vector with, for example, about 1×10⁶ particle units (pu), about 2×10⁶ pu, about 4×10⁶ pu, about 1×10⁷ pu, about 2×10⁷ pu, about 4×10⁷ pu, about 1×10⁸ pu, about 2×10⁸ pu, about 4×10⁸ pu, about 1×10⁹ pu, about 2×10⁹ pu, about 4×10⁹ pu, about 1×10¹⁰ pu, about 2×10¹⁰ pu, about 4×10¹⁰ pu, about 1×10¹¹ pu, about 2×10¹¹ pu, about 4×10¹¹ pu, about 1×10¹² pu, about 2×10¹² pu, or about 4×10¹² pu of adenoviral vector. See, for example, the adenoviral vectors in U.S. Pat. No. 8,454,972 B2 to Nabel, et. al., granted on Jun. 4, 2013; incorporated by reference herein, and the dosages at col 29, lines 36-58 thereof. In an embodiment herein, the adenovirus is delivered via multiple doses.

[0621] In an embodiment herein, the delivery is via an AAV. A therapeutically effective dosage for in vivo delivery of the AAV to a human is believed to be in the range of from about 20 to about 50 ml of saline solution containing from about 1×10¹⁰ to about 1×10¹⁰ functional AAV/ml solution. The dosage may be adjusted to balance the therapeutic benefit against any side effects. In an embodiment herein, the AAV dose is generally in the range of concentrations of from about 1×10⁵ to 1×10⁵⁰ genomes AAV, from about 1×10⁸ to 1×10²⁰ genomes AAV, from about 1×10¹⁰ to about 1×10¹⁶ genomes, or about 1×10¹¹ to about 1×10¹⁶ genomes AAV. A human dosage may be about 1×10¹³ genomes AAV. Such concentrations may be delivered in from about 0.001 ml to about 100 ml, about 0.05 to about 50 ml, or about 10 to about 25 ml of a carrier solution. Other effective dosages can be readily established by one of ordinary skill in the art through routine trials establishing dose response curves. See, for example, U.S. Pat. No. 8,404,658 B2 to Hajjar, et al., granted on Mar. 26, 2013, at col. 27, lines 45-60.

[0622] In an embodiment herein the delivery is via a plasmid. In such plasmid compositions, the dosage should be a sufficient amount of plasmid to elicit a response. For instance, suitable quantities of plasmid DNA in plasmid compositions can be from about 0.1 to about 2 mg, or from about 1 μg to about 10 μg per 70 kg individual. Plasmids of the invention will generally comprise (i) a promoter; (ii) a sequence encoding a CRISPR-Cas protein, operably linked to said promoter; (iii) a selectable marker; (iv) an origin of replication; and (v) a transcription terminator downstream of and operably linked to (ii). The plasmid can also encode the RNA components of a CRISPR complex, but one or more of these may instead be encoded on a different vector.

[0623] The doses herein are based on an average 70 kg individual. The frequency of administration is within the ambit of the medical or veterinary practitioner (e.g., physician, veterinarian), or scientist skilled in the art. It is also noted that mice used in experiments are typically about 20 g and from mice experiments one can scale up to a 70 kg individual.

[0624] The dosage used for the compositions provided herein include dosages for repeated administration or repeat dosing. In particular embodiments, the administration is repeated within a period of several weeks, months, or years. Suitable assays can be performed to obtain an optimal dosage regime. Repeated administration can allow the use of lower dosage, which can positively affect off-target modifications.

### RNA Delivery

[0625] In particular embodiments, RNA based delivery is used. In these embodiments, mRNA of the CRISPR-Cas protein, mRNA of the cytidine deaminase (which may be fused to a CRISPR-Cas protein or an adaptor), are delivered together with in vitro transcribed guide RNA. Liang et al. describes efficient genome editing using RNA based delivery (Protein Cell. 2015 May; 6(5): 363-372). In some embodiments, the mRNA(s) encoding Cas13 and/or cytidine deaminase can be chemically modified, which may lead to improved activity compared to plasmid-encoded Cas13 and/or cytidine deaminase. For example, uridines in the mRNA(s) can be partially or fully substituted with pseudouridine (Ψ), N¹-methylpseudouridine (me¹Ψ), 5-methoxyuridine (5moU). See Li et al., Nature Biomedical Engineering 1, 0066 D01:10.1038/s41551-017-0066 (2017), which is incorporated herein by reference in its entirety.

### RNP

[0626] In particular embodiments, pre-complexed guide RNA, CRISPR-Cas protein, and cytidine deaminase (which may be fused to a CRISPR-Cas protein or an adaptor) are delivered as a ribonucleoprotein (RNP). RNPs have the advantage that they lead to rapid editing effects even more so than the RNA method because this process avoids the need for transcription. An important advantage is that both RNP delivery is transient, reducing off-target effects and toxicity issues. Efficient genome editing in different cell types has been observed by Kim et al. (2014, Genome Res. 24(6):1012-9), Paix et al. (2015, Genetics 204(1):47-54), Chu et al. (2016, BMC Biotechnol. 16:4), and Wang et al. (2013, Cell. 9; 153(4):910-8).

[0627] In particular embodiments, the ribonucleoprotein is delivered by way of a polypeptide-based shuttle agent as described in WO2016161516. WO2016161516 describes efficient transduction of polypeptide cargos using synthetic peptides comprising an endosome leakage domain (ELD) operably linked to a cell penetrating domain (CPD), to a histidine-rich domain and a CPD. Similarly these polypeptides can be used for the delivery of CRISPR-effector based RNPs in eukaryotic cells

### Particles

[0628] In some aspects or embodiments, a composition comprising a delivery particle formulation may be used. In some aspects or embodiments, the formulation comprises a CRISPR complex, the complex comprising a CRISPR protein and a guide which directs sequence-specific binding of the CRISPR complex to a target sequence. In some embodiments, the delivery particle comprises a lipid-based particle, optionally a lipid nanoparticle, or cationic lipid and optionally biodegradable polymer. In some embodiments, the cationic lipid comprises 1,2-dioleoyl-3-trimethylammonium-propane (DOTAP). In some embodiments, the hydrophilic polymer comprises ethylene glycol or polyethylene glycol. In some embodiments, the delivery particle further comprises a lipoprotein, preferably cholesterol. In some embodiments, the delivery particles are less than 500 nm in diameter, optionally less than 250 nm in diameter, optionally less than 100 nm in diameter, optionally about 35 nm to about 60 nm in diameter.

[0629] Example particle delivery complexes are further disclosed in U.S. Provisional Application entitled “Nove Delivery of Large Payloads” filed 62/485,625 filed Apr. 14, 2017.

[0630] Several types of particle delivery systems and/or formulations are known to be useful in a diverse spectrum of biomedical applications. In general, a particle is defined as a small object that behaves as a whole unit with respect to its transport and properties. Particles are further classified according to diameter. Coarse particles cover a range between 2,500 and 10,000 nanometers. Fine particles are sized between 100 and 2,500 nanometers. Ultrafine particles, or nanoparticles, are generally between 1 and 100 nanometers in size. The basis of the 100-nm limit is the fact that novel properties that differentiate particles from the bulk material typically develop at a critical length scale of under 100 nm.

[0631] As used herein, a particle delivery system/formulation is defined as any biological delivery system/formulation which includes a particle in accordance with the present invention. A particle in accordance with the present invention is any entity having a greatest dimension (e.g. diameter) of less than 100 microns (μm). In some embodiments, inventive particles have a greatest dimension of less than 10 μm. In some embodiments, inventive particles have a greatest dimension of less than 2000 nanometers (nm). In some embodiments, inventive particles have a greatest dimension of less than 1000 nanometers (nm). In some embodiments, inventive particles have a greatest dimension of less than 900 nm, 800 nm, 700 nm, 600 nm, 500 nm, 400 nm, 300 nm, 200 nm, or 100 nm. Typically, inventive particles have a greatest dimension (e.g., diameter) of 500 nm or less. In some embodiments, inventive particles have a greatest dimension (e.g., diameter) of 250 nm or less. In some embodiments, inventive particles have a greatest dimension (e.g., diameter) of 200 nm or less. In some embodiments, inventive particles have a greatest dimension (e.g., diameter) of 150 nm or less. In some embodiments, inventive particles have a greatest dimension (e.g., diameter) of 100 nm or less. Smaller particles, e.g., having a greatest dimension of 50 nm or less are used in some embodiments of the invention. In some embodiments, inventive particles have a greatest dimension ranging between 25 nm and 200 nm.

[0632] In terms of this invention, it is preferred to have one or more components of CRISPR complex, e.g., CRISPR-Cas protein or mRNA, or cytidine deaminase (which may be fused to a CRISPR-Cas protein or an adaptor) or mRNA, or guide RNA delivered using nanoparticles or lipid envelopes. Other delivery systems or vectors are may be used in conjunction with the nanoparticle aspects of the invention.

[0633] In general, a “nanoparticle” refers to any particle having a diameter of less than 1000 nm. In certain preferred embodiments, nanoparticles of the invention have a greatest dimension (e.g., diameter) of 500 nm or less. In other preferred embodiments, nanoparticles of the invention have a greatest dimension ranging between 25 nm and 200 nm. In other preferred embodiments, nanoparticles of the invention have a greatest dimension of 100 nm or less. In other preferred embodiments, nanoparticles of the invention have a greatest dimension ranging between 35 nm and 60 nm. It will be appreciated that reference made herein to particles or nanoparticles can be interchangeable, where appropriate.

[0634] It will be understood that the size of the particle will differ depending as to whether it is measured before or after loading. Accordingly, in particular embodiments, the term “nanoparticles” may apply only to the particles pre loading.

[0635] Nanoparticles encompassed in the present invention may be provided in different forms, e.g., as solid nanoparticles (e.g., metal such as silver, gold, iron, titanium), non-metal, lipid-based solids, polymers), suspensions of nanoparticles, or combinations thereof. Metal, dielectric, and semiconductor nanoparticles may be prepared, as well as hybrid structures (e.g., core-shell nanoparticles). Nanoparticles made of semiconducting material may also be labeled quantum dots if they are small enough (typically sub 10 nm) that quantization of electronic energy levels occurs. Such nanoscale particles are used in biomedical applications as drug carriers or imaging agents and may be adapted for similar purposes in the present invention.

[0636] Semi-solid and soft nanoparticles have been manufactured, and are within the scope of the present invention. A prototype nanoparticle of semi-solid nature is the liposome. Various types of liposome nanoparticles are currently used clinically as delivery systems for anticancer drugs and vaccines. Nanoparticles with one half hydrophilic and the other half hydrophobic are termed Janus particles and are particularly effective for stabilizing emulsions. They can self-assemble at water/oil interfaces and act as solid surfactants.

[0637] Particle characterization (including e.g., characterizing morphology, dimension, etc.) is done using a variety of different techniques. Common techniques are electron microscopy (TEM, SEM), atomic force microscopy (AFM), dynamic light scattering (DLS), X-ray photoelectron spectroscopy (XPS), powder X-ray diffraction (XRD), Fourier transform infrared spectroscopy (FTIR), matrix-assisted laser desorption/ionization time-of-flight mass spectrometry (MALDI-TOF), ultraviolet-visible spectroscopy, dual polarization interferometry and nuclear magnetic resonance (NMR). Characterization (dimension measurements) may be made as to native particles (i.e., preloading) or after loading of the cargo (herein cargo refers to e.g., one or more components of CRISPR-Cas system e.g., CRISPR-Cas protein or mRNA, cytidine deaminase (which may be fused to a CRISPR-Cas protein or an adaptor) or mRNA, or guide RNA, or any combination thereof, and may include additional carriers and/or excipients) to provide particles of an optimal size for delivery for any in vitro, ex vivo and/or in vivo application of the present invention. In certain preferred embodiments, particle dimension (e.g., diameter) characterization is based on measurements using dynamic laser scattering (DLS). Mention is made of U.S. Pat. No. 8,709,843; U.S. Pat. Nos. 6,007,845; 5,855,913; 5,985,309; 5,543,158; and the publication by James E. Dahlman and Carmen Barnes et al. Nature Nanotechnology (2014) published online 11 May 2014, doi:10.1038/nnano.2014.84, concerning particles, methods of making and using them and measurements thereof.

[0638] Particles delivery systems within the scope of the present invention may be provided in any form, including but not limited to solid, semi-solid, emulsion, or colloidal particles. As such any of the delivery systems described herein, including but not limited to, e.g., lipid-based systems, liposomes, micelles, microvesicles, exosomes, or gene gun may be provided as particle delivery systems within the scope of the present invention.

[0639] CRISPR-Cas protein mRNA, cytidine deaminase (which may be fused to a CRISPR-Cas protein or an adaptor) or mRNA, and guide RNA may be delivered simultaneously using particles or lipid envelopes; for instance, CRISPR-Cas protein and RNA of the invention, e.g., as a complex, can be delivered via a particle as in Dahlman et al., WO2015089419 A2 and documents cited therein, such as 7C1 (see, e.g., James E. Dahlman and Carmen Barnes et al. Nature Nanotechnology (2014) published online 11 May 2014, doi:10.1038/nnano.2014.84), e.g., delivery particle comprising lipid or lipidoid and hydrophilic polymer, e.g., cationic lipid and hydrophilic polymer, for instance wherein the cationic lipid comprises 1,2-dioleoyl-3-trimethylammonium-propane (DOTAP) or 1,2-ditetradecanoyl-sn-glycero-3-phosphocholine (DMPC) and/or wherein the hydrophilic polymer comprises ethylene glycol or polyethylene glycol (PEG); and/or wherein the particle further comprises cholesterol (e.g., particle from formulation 1=DOTAP 100, DMPC 0, PEG 0, Cholesterol 0; formulation number 2=DOTAP 90, DMPC 0, PEG 10, Cholesterol 0; formulation number 3=DOTAP 90, DMPC 0, PEG 5, Cholesterol 5), wherein particles are formed using an efficient, multistep process wherein first, effector protein and RNA are mixed together, e.g., at a 1:1 molar ratio, e.g., at room temperature, e.g., for 30 minutes, e.g., in sterile, nuclease free 1×PBS; and separately, DOTAP, DMPC, PEG, and cholesterol as applicable for the formulation are dissolved in alcohol, e.g., 100% ethanol; and, the two solutions are mixed together to form particles containing the complexes).

[0640] Nucleic acid-targeting effector proteins (e.g., a Type VI protein such as Cas13) mRNA and guide RNA may be delivered simultaneously using particles or lipid envelopes. Examples of suitable particles include but are not limited to those described in U.S. Pat. No. 9,301,923.

[0641] For example, Su X, Fricke J, Kavanagh D G, Irvine D J (“In vitro and in vivo mRNA delivery using lipid-enveloped pH-responsive polymer nanoparticles” Mol Pharm. 2011 Jun. 6; 8(3):774-87. doi: 10.1021/mp100390w. Epub 2011 Apr. 1) describes biodegradable core-shell structured nanoparticles with a poly(β-amino ester) (PBAE) core enveloped by a phospholipid bilayer shell. These were developed for in vivo mRNA delivery. The pH-responsive PBAE component was chosen to promote endosome disruption, while the lipid surface layer was selected to minimize toxicity of the polycation core. Such are, therefore, preferred for delivering RNA of the present invention.

[0642] In one embodiment, particles/nanoparticles based on self assembling bioadhesive polymers are contemplated, which may be applied to oral delivery of peptides, intravenous delivery of peptides and nasal delivery of peptides, all to the brain. Other embodiments, such as oral absorption and ocular delivery of hydrophobic drugs are also contemplated. The molecular envelope technology involves an engineered polymer envelope which is protected and delivered to the site of the disease (see, e.g., Mazza, M. et al. ACSNano, 2013. 7(2): 1016-1026; Siew, A., et al. Mol Pharm, 2012. 9(1):14-28; Lalatsa, A., et al. J Contr Rel, 2012. 161(2):523-36; Lalatsa, A., et al., Mol Pharm, 2012. 9(6):1665-80; Lalatsa, A., et al. Mol Pharm, 2012. 9(6):1764-74; Garrett, N. L., et al. J Biophotonics, 2012. 5(5-6):458-68; Garrett, N. L., et al. J Raman Spect, 2012. 43(5):681-688; Ahmad, S., et al. J Royal Soc Interface 2010. 7:S423-33; Uchegbu, I. F. Expert Opin Drug Deliv, 2006. 3(5):629-40; Qu, X., et al. Biomacromolecules, 2006. 7(12):3452-9 and Uchegbu, I. F., et al. Int J Pharm, 2001. 224:185-199). Doses of about 5 mg/kg are contemplated, with single or multiple doses, depending on the target tissue.

[0643] In one embodiment, particles/nanoparticles that can deliver RNA to a cancer cell to stop tumor growth developed by Dan Anderson's lab at MIT may be used/and or adapted to the CD-functionalized CRISPR-Cas system of the present invention. In particular, the Anderson lab developed fully automated, combinatorial systems for the synthesis, purification, characterization, and formulation of new biomaterials and nanoformulations. See, e.g., Alabi et al., Proc Natl Acad Sci USA. 2013 Aug. 6; 110(32):12881-6; Zhang et al., Adv Mater. 2013 Sep. 6; 25(33):4641-5; Jiang et al., Nano Lett. 2013 Mar. 13; 13(3):1059-64; Karagiannis et al., ACS Nano. 2012 Oct. 23; 6(10):8484-7; Whitehead et al., ACS Nano. 2012 Aug. 28; 6(8):6922-9 and Lee et al., Nat Nanotechnol. 2012 Jun. 3; 7(6):389-93.

[0644] US patent application 20110293703 relates to lipidoid compounds are also particularly useful in the administration of polynucleotides, which may be applied to deliver the CD-functionalized CRISPR-Cas system of the present invention. In one aspect, the aminoalcohol lipidoid compounds are combined with an agent to be delivered to a cell or a subject to form microparticles, nanoparticles, liposomes, or micelles. The agent to be delivered by the particles, liposomes, or micelles may be in the form of a gas, liquid, or solid, and the agent may be a polynucleotide, protein, peptide, or small molecule. The aminoalcohol lipidoid compounds may be combined with other aminoalcohol lipidoid compounds, polymers (synthetic or natural), surfactants, cholesterol, carbohydrates, proteins, lipids, etc. to form the particles. These particles may then optionally be combined with a pharmaceutical excipient to form a pharmaceutical composition.

[0645] US Patent Publication No. 20110293703 also provides methods of preparing the aminoalcohol lipidoid compounds. One or more equivalents of an amine are allowed to react with one or more equivalents of an epoxide-terminated compound under suitable conditions to form an aminoalcohol lipidoid compound of the present invention. In certain embodiments, all the amino groups of the amine are fully reacted with the epoxide-terminated compound to form tertiary amines. In other embodiments, all the amino groups of the amine are not fully reacted with the epoxide-terminated compound to form tertiary amines thereby resulting in primary or secondary amines in the aminoalcohol lipidoid compound. These primary or secondary amines are left as is or may be reacted with another electrophile such as a different epoxide-terminated compound. As will be appreciated by one skilled in the art, reacting an amine with less than excess of epoxide-terminated compound will result in a plurality of different aminoalcohol lipidoid compounds with various numbers of tails. Certain amines may be fully functionalized with two epoxide-derived compound tails while other molecules will not be completely functionalized with epoxide-derived compound tails. For example, a diamine or polyamine may include one, two, three, or four epoxide-derived compound tails off the various amino moieties of the molecule resulting in primary, secondary, and tertiary amines. In certain embodiments, all the amino groups are not fully functionalized. In certain embodiments, two of the same types of epoxide-terminated compounds are used. In other embodiments, two or more different epoxide-terminated compounds are used. The synthesis of the aminoalcohol lipidoid compounds is performed with or without solvent, and the synthesis may be performed at higher temperatures ranging from 30-100° C., preferably at approximately 50-90° C. The prepared aminoalcohol lipidoid compounds may be optionally purified. For example, the mixture of aminoalcohol lipidoid compounds may be purified to yield an aminoalcohol lipidoid compound with a particular number of epoxide-derived compound tails. Or the mixture may be purified to yield a particular stereo- or regioisomer. The aminoalcohol lipidoid compounds may also be alkylated using an alkyl halide (e.g., methyl iodide) or other alkylating agent, and/or they may be acylated.

[0646] US Patent Publication No. 20110293703 also provides libraries of aminoalcohol lipidoid compounds prepared by the inventive methods. These aminoalcohol lipidoid compounds may be prepared and/or screened using high-throughput techniques involving liquid handlers, robots, microtiter plates, computers, etc. In certain embodiments, the aminoalcohol lipidoid compounds are screened for their ability to transfect polynucleotides or other agents (e.g., proteins, peptides, small molecules) into the cell.

[0647] US Patent Publication No. 20130302401 relates to a class of poly(beta-amino alcohols) (PBAAs) has been prepared using combinatorial polymerization. The inventive PBAAs may be used in biotechnology and biomedical applications as coatings (such as coatings of films or multilayer films for medical devices or implants), additives, materials, excipients, non-biofouling agents, micropatterning agents, and cellular encapsulation agents. When used as surface coatings, these PBAAs elicited different levels of inflammation, both in vitro and in vivo, depending on their chemical structures. The large chemical diversity of this class of materials allowed us to identify polymer coatings that inhibit macrophage activation in vitro. Furthermore, these coatings reduce the recruitment of inflammatory cells, and reduce fibrosis, following the subcutaneous implantation of carboxylated polystyrene microparticles. These polymers may be used to form polyelectrolyte complex capsules for cell encapsulation. The invention may also have many other biological applications such as antimicrobial coatings, DNA or siRNA delivery, and stem cell tissue engineering. The teachings of US Patent Publication No. 20130302401 may be applied to the CD-functionalized CRISPR-Cas system of the present invention.

[0648] Preassembled recombinant CRISPR-Cas complexes comprising Cas13, cytidine deaminase (which may be fused to Cas13 or an adaptor protein), and guide RNA may be transfected, for example by electroporation, resulting in high mutation rates and absence of detectable off-target mutations. Hur, J. K. et al, Targeted mutagenesis in mice by electroporation of Cas13 ribonucleoproteins, Nat Biotechnol. 2016 Jun. 6. doi: 10.1038/nbt.3596.

[0649] In terms of local delivery to the brain, this can be achieved in various ways. For instance, material can be delivered intrastriatally e.g. by injection. Injection can be performed stereotactically via a craniotomy.

[0650] In some embodiments, sugar-based particles may be used, for example GalNAc, as described herein and with reference to WO2014118272 (incorporated herein by reference) and Nair, J K et al., 2014, Journal of the American Chemical Society 136 (49), 16958-16961) and the teaching herein, especially in respect of delivery applies to all particles unless otherwise apparent. This may be considered to be a sugar-based particle and further details on other particle delivery systems and/or formulations are provided herein. GalNAc can therefore be considered to be a particle in the sense of the other particles described herein, such that general uses and other considerations, for instance delivery of said particles, apply to GalNAc particles as well. A solution-phase conjugation strategy may for example be used to attach triantennary GalNAc 0 Chem., 2015, 26 (8), pp 1451-1455). Similarly, poly(acrylate) polymers have been described for in vivo nucleic acid delivery (see WO2013158141 incorporated herein by reference). In further alternative embodiments, pre-mixing CRISPR nanoparticles (or protein complexes) with naturally occurring serum proteins may be used in order to improve delivery (Akinc A et al, 2010, Molecular Therapy vol. 18 no. 7, 1357-1364).

### Nanoclews

[0651] Further, the CD-functionalized CRISPR system may be delivered using nanoclews, for example as described in Sun W et al, Cocoon-like self-degradable DNA nanoclew for anticancer drug delivery., J Am Chem Soc. 2014 Oct. 22; 136(42):14722-5. doi: 10.1021/ja5088024. Epub 2014 Oct. 13.; or in Sun W et al, Self-Assembled DNA Nanoclews for the Efficient Delivery of CRISPR-Cas9 for Genome Editing., Angew Chem Int Ed Engl. 2015 Oct. 5; 54(41):12029-33. doi: 10.1002/anie.201506030. Epub 2015 Aug. 27.

### LNP

[0652] In some embodiments, delivery is by encapsulation of the Cas13 protein or mRNA form in a lipid particle such as an LNP. In some embodiments, therefore, lipid nanoparticles (LNPs) are contemplated. An antitransthyretin small interfering RNA has been encapsulated in lipid nanoparticles and delivered to humans (see, e.g., Coelho et al., N Engl J Med 2013; 369:819-29), and such a system may be adapted and applied to the CRISPR Cas system of the present invention. Doses of about 0.01 to about 1 mg per kg of body weight administered intravenously are contemplated. Medications to reduce the risk of infusion-related reactions are contemplated, such as dexamethasone, acetaminophen, diphenhydramine or cetirizine, and ranitidine are contemplated. Multiple doses of about 0.3 mg per kilogram every 4 weeks for five doses are also contemplated.

[0653] LNPs have been shown to be highly effective in delivering siRNAs to the liver (see, e.g., Tabernero et al., Cancer Discovery, April 2013, Vol. 3, No. 4, pages 363-470) and are therefore contemplated for delivering RNA encoding CRISPR Cas to the liver. A dosage of about four doses of 6 mg/kg of the LNP every two weeks may be contemplated. Tabernero et al. demonstrated that tumor regression was observed after the first 2 cycles of LNPs dosed at 0.7 mg/kg, and by the end of 6 cycles the patient had achieved a partial response with complete regression of the lymph node metastasis and substantial shrinkage of the liver tumors. A complete response was obtained after 40 doses in this patient, who has remained in remission and completed treatment after receiving doses over 26 months. Two patients with RCC and extrahepatic sites of disease including kidney, lung, and lymph nodes that were progressing following prior therapy with VEGF pathway inhibitors had stable disease at all sites for approximately 8 to 12 months, and a patient with PNET and liver metastases continued on the extension study for 18 months (36 doses) with stable disease.

[0654] However, the charge of the LNP must be taken into consideration. As cationic lipids combined with negatively charged lipids to induce nonbilayer structures that facilitate intracellular delivery. Because charged LNPs are rapidly cleared from circulation following intravenous injection, ionizable cationic lipids with pKa values below 7 were developed (see, e.g., Rosin et al, Molecular Therapy, vol. 19, no. 12, pages 1286-2200, December 2011). Negatively charged polymers such as RNA may be loaded into LNPs at low pH values (e.g., pH 4) where the ionizable lipids display a positive charge. However, at physiological pH values, the LNPs exhibit a low surface charge compatible with longer circulation times. Four species of ionizable cationic lipids have been focused upon, namely 1,2-dilineoyl-3-dimethylammonium-propane (DLinDAP), 1,2-dilinoleyloxy-3-N,N-dimethylaminopropane (DLinDMA), 1,2-dilinoleyloxy-keto-N,N-dimethyl-3-aminopropane (DLinKDMA), and 1,2-dilinoleyl-4-(2-dimethylaminoethyl)[1,3]-dioxolane (DLinKC2-DMA). It has been shown that LNP siRNA systems containing these lipids exhibit remarkably different gene silencing properties in hepatocytes in vivo, with potencies varying according to the series DLinKC2-DMA>DLinKDMA>DLinDMA>>DLinDAP employing a Factor VII gene silencing model (see, e.g., Rosin et al, Molecular Therapy, vol. 19, no. 12, pages 1286-2200, December 2011). A dosage of 1 μg/ml of LNP or CRISPR-Cas RNA in or associated with the LNP may be contemplated, especially for a formulation containing DLinKC2-DMA.

[0655] Preparation of LNPs and CRISPR Cas encapsulation may be used/and or adapted from Rosin et al, Molecular Therapy, vol. 19, no. 12, pages 1286-2200, December 2011). The cationic lipids 1,2-dilineoyl-3-dimethylammonium-propane (DLinDAP), 1,2-dilinoleyloxy-3-N,N-dimethylaminopropane (DLinDMA), 1,2-dilinoleyloxyketo-N,N-dimethyl-3-aminopropane (DLinK-DMA), 1,2-dilinoleyl-4-(2-dimethylaminoethyl)[1,3]-dioxolane (DLinKC2-DMA), (3-o-[2″-(methoxypolyethyleneglycol 2000) succinoyl]-1,2-dimyristoyl-sn-glycol (PEG-S-DMG), and R-3-[(w-methoxy-poly(ethylene glycol)2000) carbamoyl]-1,2-dimyristyloxlpropyl-3-amine (PEG-C-DOMG) may be provided by Tekmira Pharmaceuticals (Vancouver, Canada) or synthesized. Cholesterol may be purchased from Sigma (St Louis, Mo.). The specific CRISPR Cas RNA may be encapsulated in LNPs containing DLinDAP, DLinDMA, DLinK-DMA, and DLinKC2-DMA (cationic lipid:DSPC:CHOL: PEGS-DMG or PEG-C-DOMG at 40:10:40:10 molar ratios). When required, 0.2% SP-DiOC18 (Invitrogen, Burlington, Canada) may be incorporated to assess cellular uptake, intracellular delivery, and biodistribution. Encapsulation may be performed by dissolving lipid mixtures comprised of cationic lipid:DSPC:cholesterol:PEG-c-DOMG (40:10:40:10 molar ratio) in ethanol to a final lipid concentration of 10 mmol/1. This ethanol solution of lipid may be added drop-wise to 50 mmol/1 citrate, pH 4.0 to form multilamellar vesicles to produce a final concentration of 30% ethanol vol/vol. Large unilamellar vesicles may be formed following extrusion of multilamellar vesicles through two stacked 80 nm Nuclepore polycarbonate filters using the Extruder (Northern Lipids, Vancouver, Canada). Encapsulation may be achieved by adding RNA dissolved at 2 mg/ml in 50 mmol/1 citrate, pH 4.0 containing 30% ethanol vol/vol drop-wise to extruded preformed large unilamellar vesicles and incubation at 31° C. for 30 minutes with constant mixing to a final RNA/lipid weight ratio of 0.06/1 wt/wt. Removal of ethanol and neutralization of formulation buffer were performed by dialysis against phosphate-buffered saline (PBS), pH 7.4 for 16 hours using Spectra/Por 2 regenerated cellulose dialysis membranes. Nanoparticle size distribution may be determined by dynamic light scattering using a NICOMP 370 particle sizer, the vesicle/intensity modes, and Gaussian fitting (Nicomp Particle Sizing, Santa Barbara, Calif.). The particle size for all three LNP systems may be ˜70 nm in diameter. RNA encapsulation efficiency may be determined by removal of free RNA using VivaPureD MiniH columns (Sartorius Stedim Biotech) from samples collected before and after dialysis. The encapsulated RNA may be extracted from the eluted nanoparticles and quantified at 260 nm. RNA to lipid ratio was determined by measurement of cholesterol content in vesicles using the Cholesterol E enzymatic assay from Wako Chemicals USA (Richmond, Va.). In conjunction with the herein discussion of LNPs and PEG lipids, PEGylated liposomes or LNPs are likewise suitable for delivery of a CRISPR-Cas system or components thereof.

[0656] A lipid premix solution (20.4 mg/ml total lipid concentration) may be prepared in ethanol containing DLinKC2-DMA, DSPC, and cholesterol at 50:10:38.5 molar ratios. Sodium acetate may be added to the lipid premix at a molar ratio of 0.75:1 (sodium acetate:DLinKC2-DMA). The lipids may be subsequently hydrated by combining the mixture with 1.85 volumes of citrate buffer (10 mmol/1, pH 3.0) with vigorous stirring, resulting in spontaneous liposome formation in aqueous buffer containing 35% ethanol. The liposome solution may be incubated at 37° C. to allow for time-dependent increase in particle size. Aliquots may be removed at various times during incubation to investigate changes in liposome size by dynamic light scattering (Zetasizer Nano ZS, Malvern Instruments, Worcestershire, UK). Once the desired particle size is achieved, an aqueous PEG lipid solution (stock=10 mg/ml PEG-DMG in 35% (vol/vol) ethanol) may be added to the liposome mixture to yield a final PEG molar concentration of 3.5% of total lipid. Upon addition of PEG-lipids, the liposomes should their size, effectively quenching further growth. RNA may then be added to the empty liposomes at an RNA to total lipid ratio of approximately 1:10 (wt:wt), followed by incubation for 30 minutes at 37° C. to form loaded LNPs. The mixture may be subsequently dialyzed overnight in PBS and filtered with a 0.45-μm syringe filter.

[0657] Spherical Nucleic Acid (SNA™) constructs and other nanoparticles (particularly gold nanoparticles) are also contemplated as a means to delivery CRISPR-Cas system to intended targets. Significant data show that AuraSense Therapeutics' Spherical Nucleic Acid (SNA™) constructs, based upon nucleic acid-functionalized gold nanoparticles, are useful.

[0658] Literature that may be employed in conjunction with herein teachings include: Cutler et al., J. Am. Chem. Soc. 2011 133:9254-9257, Hao et al., Small. 2011 7:3158-3162, Zhang et al., ACS Nano. 2011 5:6962-6970, Cutler et al., J. Am. Chem. Soc. 2012 134:1376-1391, Young et al., Nano Lett. 2012 12:3867-71, Zheng et al., Proc. Natl. Acad. Sci. USA. 2012 109:11975-80, Mirkin, Nanomedicine 2012 7:635-638 Zhang et al., J. Am. Chem. Soc. 2012 134:16488-1691, Weintraub, Nature 2013 495:S14-S16, Choi et al., Proc. Natl. Acad. Sci. USA. 2013 110(19):7625-7630, Jensen et al., Sci. Transl. Med. 5, 209ra152 (2013) and Mirkin, et al., Small, 10:186-192.

[0659] Self-assembling nanoparticles with RNA may be constructed with polyethyleneimine (PEI) that is PEGylated with an Arg-Gly-Asp (RGD) peptide ligand attached at the distal end of the polyethylene glycol (PEG). This system has been used, for example, as a means to target tumor neovasculature expressing integrins and deliver siRNA inhibiting vascular endothelial growth factor receptor-2 (VEGF R2) expression and thereby achieve tumor angiogenesis (see, e.g., Schiffelers et al., Nucleic Acids Research, 2004, Vol. 32, No. 19). Nanoplexes may be prepared by mixing equal volumes of aqueous solutions of cationic polymer and nucleic acid to give a net molar excess of ionizable nitrogen (polymer) to phosphate (nucleic acid) over the range of 2 to 6. The electrostatic interactions between cationic polymers and nucleic acid resulted in the formation of polyplexes with average particle size distribution of about 100 nm, hence referred to here as nanoplexes. A dosage of about 100 to 200 mg of CRISPR Cas is envisioned for delivery in the self-assembling nanoparticles of Schiffelers et al.

[0660] The nanoplexes of Bartlett et al. (PNAS, Sep. 25, 2007, vol. 104, no. 39) may also be applied to the present invention. The nanoplexes of Bartlett et al. are prepared by mixing equal volumes of aqueous solutions of cationic polymer and nucleic acid to give a net molar excess of ionizable nitrogen (polymer) to phosphate (nucleic acid) over the range of 2 to 6. The electrostatic interactions between cationic polymers and nucleic acid resulted in the formation of polyplexes with average particle size distribution of about 100 nm, hence referred to here as nanoplexes. The DOTA-siRNA of Bartlett et al. was synthesized as follows: 1,4,7,10-tetraazacyclododecane-1,4,7,10-tetraacetic acid mono(N-hydroxysuccinimide ester) (DOTA-NHSester) was ordered from Macrocyclics (Dallas, Tex.). The amine modified RNA sense strand with a 100-fold molar excess of DOTA-NHS-ester in carbonate buffer (pH 9) was added to a microcentrifuge tube. The contents were reacted by stirring for 4 h at room temperature. The DOTA-RNAsense conjugate was ethanol-precipitated, resuspended in water, and annealed to the unmodified antisense strand to yield DOTA-siRNA. All liquids were pretreated with Chelex-100 (Bio-Rad, Hercules, Calif.) to remove trace metal contaminants. Tf-targeted and nontargeted siRNA nanoparticles may be formed by using cyclodextrin-containing polycations. Typically, nanoparticles were formed in water at a charge ratio of 3 (+/−) and an siRNA concentration of 0.5 g/liter. One percent of the adamantane-PEG molecules on the surface of the targeted nanoparticles were modified with Tf (adamantane-PEG-Tf). The nanoparticles were suspended in a 5% (wt/vol) glucose carrier solution for injection.

[0661] Davis et al. (Nature, Vol 464, 15 Apr. 2010) conducts a RNA clinical trial that uses a targeted nanoparticle-delivery system (clinical trial registration number NCT00689065). Patients with solid cancers refractory to standard-of-care therapies are administered doses of targeted nanoparticles on days 1, 3, 8 and 10 of a 21-day cycle by a 30-min intravenous infusion. The nanoparticles consist of a synthetic delivery system containing: (1) a linear, cyclodextrin-based polymer (CDP), (2) a human transferrin protein (TF) targeting ligand displayed on the exterior of the nanoparticle to engage TF receptors (TFR) on the surface of the cancer cells, (3) a hydrophilic polymer (polyethylene glycol (PEG) used to promote nanoparticle stability in biological fluids), and (4) siRNA designed to reduce the expression of the RRM2 (sequence used in the clinic was previously denoted siR2B+5). The TFR has long been known to be upregulated in malignant cells, and RRM2 is an established anti-cancer target. These nanoparticles (clinical version denoted as CALAA-01) have been shown to be well tolerated in multi-dosing studies in non-human primates. Although a single patient with chronic myeloid leukaemia has been administered siRNA by liposomal delivery, Davis et al.'s clinical trial is the initial human trial to systemically deliver siRNA with a targeted delivery system and to treat patients with solid cancer. To ascertain whether the targeted delivery system can provide effective delivery of functional siRNA to human tumors, Davis et al. investigated biopsies from three patients from three different dosing cohorts; patients A, B and C, all of whom had metastatic melanoma and received CALAA-01 doses of 18, 24 and 30 mg m⁻² siRNA, respectively. Similar doses may also be contemplated for the CRISPR Cas system of the present invention. The delivery of the invention may be achieved with nanoparticles containing a linear, cyclodextrin-based polymer (CDP), a human transferrin protein (TF) targeting ligand displayed on the exterior of the nanoparticle to engage TF receptors (TFR) on the surface of the cancer cells and/or a hydrophilic polymer (for example, polyethylene glycol (PEG) used to promote nanoparticle stability in biological fluids).

[0662] U.S. Pat. No. 8,709,843, incorporated herein by reference, provides a drug delivery system for targeted delivery of therapeutic agent-containing particles to tissues, cells, and intracellular compartments. The invention provides targeted particles comprising comprising polymer conjugated to a surfactant, hydrophilic polymer or lipid. U.S. Pat. No. 6,007,845, incorporated herein by reference, provides particles which have a core of a multiblock copolymer formed by covalently linking a multifunctional compound with one or more hydrophobic polymers and one or more hydrophilic polymers, and contain a biologically active material. U.S. Pat. No. 5,855,913, incorporated herein by reference, provides a particulate composition having aerodynamically light particles having a tap density of less than 0.4 g/cm3 with a mean diameter of between 5 μm and 30 μm, incorporating a surfactant on the surface thereof for drug delivery to the pulmonary system. U.S. Pat. No. 5,985,309, incorporated herein by reference, provides particles incorporating a surfactant and/or a hydrophilic or hydrophobic complex of a positively or negatively charged therapeutic or diagnostic agent and a charged molecule of opposite charge for delivery to the pulmonary system. U.S. Pat. No. 5,543,158, incorporated herein by reference, provides biodegradable injectable particles having a biodegradable solid core containing a biologically active material and poly(alkylene glycol) moieties on the surface. WO2012135025 (also published as US20120251560), incorporated herein by reference, describes conjugated polyethyleneimine (PEI) polymers and conjugated aza-macrocycles (collectively referred to as “conjugated lipomer” or “lipomers”). In certain embodiments, it can envisioned that such conjugated lipomers can be used in the context of the CRISPR-Cas system to achieve in vitro, ex vivo and in vivo genomic perturbations to modify gene expression, including modulation of protein expression.

[0663] In one embodiment, the nanoparticle may be epoxide-modified lipid-polymer, advantageously 7C1 (see, e.g., James E. Dahlman and Carmen Barnes et al. Nature Nanotechnology (2014) published online 11 May 2014, doi:10.1038/nnano.2014.84). C71 was synthesized by reacting C15 epoxide-terminated lipids with PEI600 at a 14:1 molar ratio, and was formulated with C14PEG2000 to produce nanoparticles (diameter between 35 and 60 nm) that were stable in PBS solution for at least 40 days.

[0664] An epoxide-modified lipid-polymer may be utilized to deliver the CRISPR-Cas system of the present invention to pulmonary, cardiovascular or renal cells, however, one of skill in the art may adapt the system to deliver to other target organs. Dosage ranging from about 0.05 to about 0.6 mg/kg are envisioned. Dosages over several days or weeks are also envisioned, with a total dosage of about 2 mg/kg.

[0665] In some embodiments, the LNP for delivering the RNA molecules is prepared by methods known in the art, such as those described in, for example, WO 2005/105152 (PCT/EP2005/004920), WO 2006/069782 (PCT/EP2005/014074), WO 2007/121947 (PCT/EP2007/003496), and WO 2015/082080 (PCT/EP2014/003274), which are herein incorporated by reference. LNPs aimed specifically at the enhanced and improved delivery of siRNA into mammalian cells are described in, for example, Aleku et al., Cancer Res., 68(23): 9788-98 (Dec. 1, 2008), Strumberg et al., Int. J. Clin. Pharmacol. Ther., 50(1): 76-8 (January 2012), Schultheis et al., J. Clin. Oncol., 32(36): 4141-48 (Dec. 20, 2014), and Fehring et al., Mol. Ther., 22(4): 811-20 (Apr. 22, 2014), which are herein incorporated by reference and may be applied to the present technology.

[0666] In some embodiments, the LNP includes any LNP disclosed in WO 2005/105152 (PCT/EP2005/004920), WO 2006/069782 (PCT/EP2005/014074), WO 2007/121947 (PCT/EP2007/003496), and WO 2015/082080 (PCT/EP2014/003274).

[0667] In some embodiments, the LNP includes at least one lipid having Formula I:

[chemical structure]

wherein R1 and R2 are each and independently selected from the group comprising alkyl, n is any integer between 1 and 4, and R3 is an acyl selected from the group comprising lysyl, ornithyl, 2,4-diaminobutyryl, histidyl and an acyl moiety according to Formula II:

[chemical structure]

wherein m is any integer from 1 to 3 and Y⁻ is a pharmaceutically acceptable anion. In some embodiments, a lipid according to Formula I includes at least two asymmetric C atoms. In some embodiments, enantiomers of Formula I include, but are not limited to, R-R; S-S; R—S and S-R enantiomer.

[0668] In some embodiments, R1 is lauryl and R2 is myristyl. In another embodiment, R1 is palmityl and R2 is oleyl. In some embodiments, m is 1 or 2. In some embodiments, Y⁻ is selected from halogenids, acetate or trifluoroacetate.

[0669] In some embodiments, the LNP comprises one or more lipids select from: β-arginyl-2,3-diamino propionic acid-N-palmityl-N-oleyl-amide trihydrochloride (Formula III):

[chemical structure]

β-arginyl-2,3-diamino propionic acid-N-lauryl-N-myristyl-amide trihydrochloride (Formula IV):

[chemical structure]

and ε-arginyl-lysine-N-lauryl-N-myristyl-amide trihydrochloride (Formula V):

[chemical structure]

[0670] In some embodiments, the LNP also includes a constituent. By way of example, but not by way of limitation, in some embodiments, the constituent is selected from peptides, proteins, oligonucleotides, polynucleotides, nucleic acids, or a combination thereof. In some embodiments, the constituent is an antibody, e.g., a monoclonal antibody. In some embodiments, the constituent is a nucleic acid selected from, e.g., ribozymes, aptamers, spiegelmers, DNA, RNA, PNA, LNA, or a combination thereof. In some embodiments, the nucleic acid is guide RNA and/or mRNA.

[0671] In some embodiments, the constituent of the LNP comprises an mRNA encoding a CRIPSR-Cas protein. In some embodiments, the constituent of the LNP comprises an mRNA encoding a Type-II or Type-V CRIPSR-Cas protein. In some embodiments, the constituent of the LNP comprises an mRNA encoding a cytidine deaminase (which may be fused to a CRISPR-Cas protein or an adaptor protein).

[0672] In some embodiments, the constituent of the LNP further comprises one or more guide RNA. In some embodiments, the LNP is configured to deliver the aforementioned mRNA and guide RNA to vascular endothelium. In some embodiments, the LNP is configured to deliver the aforementioned mRNA and guide RNA to pulmonary endothelium. In some embodiments, the LNP is configured to deliver the aforementioned mRNA and guide RNA to liver. In some embodiments, the LNP is configured to deliver the aforementioned mRNA and guide RNA to lung. In some embodiments, the LNP is configured to deliver the aforementioned mRNA and guide RNA to hearts. In some embodiments, the LNP is configured to deliver the aforementioned mRNA and guide RNA to spleen. In some embodiments, the LNP is configured to deliver the aforementioned mRNA and guide RNA to kidney. In some embodiments, the LNP is configured to deliver the aforementioned mRNA and guide RNA to pancrea. In some embodiments, the LNP is configured to deliver the aforementioned mRNA and guide RNA to brain. In some embodiments, the LNP is configured to deliver the aforementioned mRNA and guide RNA to macrophages.

[0673] In some embodiments, the LNP also includes at least one helper lipid. In some embodiments, the helper lipid is selected from phospholipids and steroids. In some embodiments, the phospholipids are di- and/or monoester of the phosphoric acid. In some embodiments, the phospholipids are phosphoglycerides and/or sphingolipids. In some embodiments, the steroids are naturally occurring and/or synthetic compounds based on the partially hydrogenated cyclopenta[a]phenanthrene. In some embodiments, the steroids contain 21 to 30 C atoms. In some embodiments, the steroid is cholesterol. In some embodiments, the helper lipid is selected from 1,2-diphytanoyl-sn-glycero-3-phosphoethanolamine (DPhyPE), ceramide, and 1,2-dioleylsn-glycero-3-phosphoethanolamine (DOPE).

[0674] In some embodiments, the at least one helper lipid comprises a moiety selected from the group comprising a PEG moiety, a HEG moiety, a polyhydroxyethyl starch (polyHES) moiety and a polypropylene moiety. In some embodiments, the moiety has a molecule weight between about 500 to 10,000 Da or between about 2,000 to 5,000 Da. In some embodiments, the PEG moiety is selected from 1,2-di stearoyl-sn-glycero-3 phosphoethanolamine, 1,2-dialkyl-sn-glycero-3-phosphoethanolamine, and Ceramide-PEG. In some embodiments, the PEG moiety has a molecular weight between about 500 to 10,000 Da or between about 2,000 to 5,000 Da. In some embodiments, the PEG moiety has a molecular weight of 2,000 Da.

[0675] In some embodiments, the helper lipid is between about 20 mol % to 80 mol % of the total lipid content of the composition. In some embodiments, the helper lipid component is between about 35 mol % to 65 mol % of the total lipid content of the LNP. In some embodiments, the LNP includes lipids at 50 mol % and the helper lipid at 50 mol % of the total lipid content of the LNP.

[0676] In some embodiments, the LNP includes any of β-3-arginyl-2,3-diaminopropionic acid-N-palmityl-N-oleyl-amide trihydrochloride, β-arginyl-2,3-diaminopropionic acid-N-lauryl-N-myristyl-amide trihydrochloride or β-arginyl-lysine-N-lauryl-N-myristyl-amide trihydrochloride in combination with DPhyPE, wherein the content of DPhyPE is about 80 mol %, 65 mol %, 50 mol % and 35 mol % of the overall lipid content of the LNP. In some embodiments, the LNP includes β-arginyl-2,3-diamino propionic acid-N-pahnityl-N-oleyl-amide trihydrochloride (lipid) and 1,2-diphytanoyl-sn-glycero-3-phosphoethanolamine (helper lipid). In some embodiments, the LNP includes β-arginyl-2,3-diamino propionic acid-N-palmityl-N-oleyl-amide trihydrochloride (lipid), 1,2-diphytanoyl-sn-glycero-3-phosphoethanolamine (first helper lipid), and 1,2-disteroyl-sn-glycero-3-phosphoethanolamine-PEG2000 (second helper lipid).

[0677] In some embodiments, the second helper lipid is between about 0.05 mol % to 4.9 mol % or between about 1 mol % to 3 mol % of the total lipid content. In some embodiments, the LNP includes lipids at between about 45 mol % to 50 mol % of the total lipid content, a first helper lipid between about 45 mol % to 50 mol % of the total lipid content, under the proviso that there is a PEGylated second helper lipid between about 0.1 mol % to 5 mol %, between about 1 mol % to 4 mol %, or at about 2 mol % of the total lipid content, wherein the sum of the content of the lipids, the first helper lipid, and of the second helper lipid is 100 mol % of the total lipid content and wherein the sum of the first helper lipid and the second helper lipid is 50 mol % of the total lipid content. In some embodiments, the LNP comprises: (a) 50 mol % of β-arginyl-2,3-diamino propionic acid-N-palmityl-N-oleyl-amide trihydrochloride, 48 mol % of 1,2-diphytanoyl-sn-glycero-3-phosphoethanolamine; and 2 mol % 1,2-distearoyl-sn-glycero-3-phosphoethanolamine-PEG2000; or (b) 50 mol % of β-arginyl-2,3-diamino propionic acid-N-palmityl-N-oleyl-amide trihydrocloride, 49 mol % 1,2-diphytanoyl-sn-glycero-3-phosphoethanolamine; and 1 mol % N(Carbonyl-methoxypolyethylenglycol-2000)-1,2-di stearoyl-sn-glycero3-phosphoethanolamine, or a sodium salt thereof.

[0678] In some embodiments, the LNP contains a nucleic acid, wherein the charge ratio of nucleic acid backbone phosphates to cationic lipid nitrogen atoms is about 1: 1.5-7 or about 1:4.

[0679] In some embodiments, the LNP also includes a shielding compound, which is removable from the lipid composition under in vivo conditions. In some embodiments, the shielding compound is a biologically inert compound. In some embodiments, the shielding compound does not carry any charge on its surface or on the molecule as such. In some embodiments, the shielding compounds are polyethylenglycoles (PEGs), hydroxyethylglucose (HEG) based polymers, polyhydroxyethyl starch (polyHES) and polypropylene. In some embodiments, the PEG, HEG, polyHES, and a polypropylene weight between about 500 to 10,000 Da or between about 2000 to 5000 Da. In some embodiments, the shielding compound is PEG2000 or PEG5000.

[0680] In some embodiments, the LNP includes at least one lipid, a first helper lipid, and a shielding compound that is removable from the lipid composition under in vivo conditions. In some embodiments, the LNP also includes a second helper lipid. In some embodiments, the first helper lipid is ceramide. In some embodiments, the second helper lipid is ceramide. In some embodiments, the ceramide comprises at least one short carbon chain substituent of from 6 to 10 carbon atoms. In some embodiments, the ceramide comprises 8 carbon atoms. In some embodiments, the shielding compound is attached to a ceramide. In some embodiments, the shielding compound is attached to a ceramide. In some embodiments, the shielding compound is covalently attached to the ceramide. In some embodiments, the shielding compound is attached to a nucleic acid in the LNP. In some embodiments, the shielding compound is covalently attached to the nucleic acid. In some embodiments, the shielding compound is attached to the nucleic acid by a linker. In some embodiments, the linker is cleaved under physiological conditions. In some embodiments, the linker is selected from ssRNA, ssDNA, dsRNA, dsDNA, peptide, S-S-linkers and pH sensitive linkers. In some embodiments, the linker moiety is attached to the 3′ end of the sense strand of the nucleic acid. In some embodiments, the shielding compound comprises a pH-sensitive linker or a pH-sensitive moiety. In some embodiments, the pH-sensitive linker or pH-sensitive moiety is an anionic linker or an anionic moiety. In some embodiments, the anionic linker or anionic moiety is less anionic or neutral in an acidic environment. In some embodiments, the pH-sensitive linker or the pH-sensitive moiety is selected from the oligo (glutamic acid), oligophenolate(s) and diethylene triamine penta acetic acid.

[0681] In any of the LNP embodiments in the previous paragraph, the LNP can have an osmolality between about 50 to 600 mosmole/kg, between about 250 to 350 mosmole/kg, or between about 280 to 320 mosmole/kg, and/or wherein the LNP formed by the lipid and/or one or two helper lipids and the shielding compound have a particle size between about 20 to 200 nm, between about 30 to 100 nm, or between about 40 to 80 nm.

[0682] In some embodiments, the shielding compound provides for a longer circulation time in vivo and allows for a better biodistribution of the nucleic acid containing LNP. In some embodiments, the shielding compound prevents immediate interaction of the LNP with serum compounds or compounds of other bodily fluids or cytoplasma membranes, e.g., cytoplasma membranes of the endothelial lining of the vasculature, into which the LNP is administered. Additionally or alternatively, in some embodiments, the shielding compounds also prevent elements of the immune system from immediately interacting with the LNP. Additionally or alternatively, in some embodiments, the shielding compound acts as an anti-opsonizing compound. Without wishing to be bound by any mechanism or theory, in some embodiments, the shielding compound forms a cover or coat that reduces the surface area of the LNP available for interaction with its environment. Additionally or alternatively, in some embodiments, the shielding compound shields the overall charge of the LNP.

[0683] In another embodiment, the LNP includes at least one cationic lipid having Formula VI:

[chemical structure]

wherein n is 1, 2, 3, or 4, wherein m is 1, 2, or 3, wherein Y⁻ is anion, wherein each of R¹ and R² is individually and independently selected from the group consisting of linear C12-C18 alkyl and linear C12-C18 alkenyl, a sterol compound, wherein the sterol compound is selected from the group consisting of cholesterol and stigmasterol, and a PEGylated lipid, wherein the PEGylated lipid comprises a PEG moiety, wherein the PEGylated lipid is selected from the group consisting of:
a PEGylated phosphoethanolamine of Formula VII:

[chemical structure]

wherein R³ and R⁴ are individually and independently linear C13-C17 alkyl, and p is any integer between 15 to 130;
a PEGylated ceramide of Formula VIII:

[chemical structure]

wherein R⁵ is linear C7-C15 alkyl, and q is any number between 15 to 130; and
a PEGylated diacylglycerol of Formula IX:

[chemical structure]

wherein each of R⁶ and R⁷ is individually and independently linear C11-C17 alkyl, and r is any integer from 15 to 130.

[0684] In some embodiments, 10 and R² are different from each other. In some embodiments, 10 is palmityl and R² is oleyl. In some embodiments, 10 is lauryl and R² is myristyl. In some embodiments, 10 and R² are the same. In some embodiments, each of 10 and R² is individually and independently selected from the group consisting of C12 alkyl, C14 alkyl, C16 alkyl, C18 alkyl, C12 alkenyl, C14 alkenyl, C16 alkenyl and C18 alkenyl. In some embodiments, each of C12 alkenyl, C14 alkenyl, C16 alkenyl and C1 8 alkenyl comprises one or two double bonds. In some embodiments, C18 alkenyl is C18 alkenyl with one double bond between C9 and C10. In some embodiments, C18 alkenyl is cis-9-octadecyl.

[0685] In some embodiments, the cationic lipid is a compound of Formula X:

[chemical structure]

In some embodiments, Y⁻ is selected from halogenids, acetate and trifluoroacetate. In some embodiments, the cationic lipid is β-arginyl-2,3-diamino propionic acid-N-palmityl-N-oleyl-amide trihydrochloride of Formula III:

[chemical structure]

In some embodiments, the cationic lipid is β-arginyl-2,3-diamino propionic acid-N-lauryl-N-myristyl-amide trihydrochloride of Formula IV:

[chemical structure]

In some embodiments, the cationic lipid is β-arginyl-lysine-N-lauryl-N-myristyl-amide trihydrochloride of Formula V:

[chemical structure]

[0686] In some embodiments, the sterol compound is cholesterol. In some embodiments, the sterol compound is stigmasterin.

[0687] In some embodiments, the PEG moiety of the PEGylated lipid has a molecular weight from about 800 to 5,000 Da. In some embodiments, the molecular weight of the PEG moiety of the PEGylated lipid is about 800 Da. In some embodiments, the molecular weight of the PEG moiety of the PEGylated lipid is about 2,000 Da. In some embodiments, the molecular weight of the PEG moiety of the PEGylated lipid is about 5,000 Da. In some embodiments, the PEGylated lipid is a PEGylated phosphoethanolamine of Formula VII, wherein each of R³ and R⁴ is individually and independently linear C13-C17 alkyl, and p is any integer from 18, 19 or 20, or from 44, 45 or 46 or from 113, 114 or 115. In some embodiments, R³ and R⁴ are the same. In some embodiments, R³ and R⁴ are different. In some embodiments, each of R³ and R⁴ is individually and independently selected from the group consisting of C13 alkyl, C15 alkyl and C17 alkyl. In some embodiments, the PEGylated phosphoethanolamine of Formula VII is 1,2-distearoyl-sn-glycero-3-phosphoethanolamine-N-[methoxy(polyethylene glycol)-2000] (ammonium salt):

[chemical structure]

In some embodiments, the PEGylated phosphoethanolamine of Formula VII is 1,2-distearoyl-sn-glycero-3-phosphoethanolamine-N-[methoxy(polyethylene glycol)-5000] (ammonium salt):

[chemical structure]

In some embodiments, the PEGylated lipid is a PEGylated ceramide of Formula VIII, wherein R⁵ is linear C7-C15 alkyl, and q is any integer from 18, 19 or 20, or from 44, 45 or 46 or from 113, 114 or 115. In some embodiments, R⁵ is linear C7 alkyl. In some embodiments, R⁵ is linear C15 alkyl. In some embodiments, the PEGylated ceramide of Formula VIII is N-octanoyl-sphingosine-1-{succinyl[methoxy(polyethylene glycol)2000]}:

[chemical structure]

In some embodiments, the PEGylated ceramide of Formula VIII is N-palmitoyl-sphingosine-1-{succinyl[methoxy(polyethylene glycol)2000]}

[chemical structure]

In some embodiments, the PEGylated lipid is a PEGylated diacylglycerol of Formula IX, wherein each of R⁶ and R⁷ is individually and independently linear C11-C17 alkyl, and r is any integer from 18, 19 or 20, or from 44, 45 or 46 or from 113, 114 or 115. In some embodiments, R⁶ and R⁷ are the same. In some embodiments, R⁶ and R⁷ are different. In some embodiments, each of R⁶ and R⁷ is individually and independently selected from the group consisting of linear C17 alkyl, linear C15 alkyl and linear C13 alkyl. In some embodiments, the PEGylated diacylglycerol of Formula IX 1,2-Distearoyl-sn-glycerol [methoxy(polyethylene glycol)2000]:

[chemical structure]

In some embodiments, the PEGylated diacylglycerol of Formula IX is 1,2-Dipalmitoyl-sn-glycerol [methoxy(polyethylene glycol)2000]:

[chemical structure]

In some embodiments, the PEGylated diacylglycerol of Formula IX is:

[chemical structure]

In some embodiments, the LNP includes at least one cationic lipid selected from of Formulas III, IV, and V, at least one sterol compound selected from a cholesterol and stigmasterin, and wherein the PEGylated lipid is at least one selected from Formulas XI and XII. In some embodiments, the LNP includes at least one cationic lipid selected from Formulas III, IV, and V, at least one sterol compound selected from a cholesterol and stigmasterin, and wherein the PEGylated lipid is at least one selected from Formulas XIII and XIV. In some embodiments, the LNP includes at least one cationic lipid selected from Formulas III, IV, and V, at least one sterol compound selected from a cholesterol and stigmasterin, and wherein the PEGylated lipid is at least one selected from Formulas XV and XVI. In some embodiments, the LNP includes a cationic lipid of Formula III, a cholesterol as the sterol compound, and wherein the PEGylated lipid is Formula XI.

[0688] In any of the LNP embodiments in the previous paragraph, wherein the content of the cationic lipid composition is between about 65 mole % to 75 mole %, the content of the sterol compound is between about 24 mole % to 34 mole % and the content of the PEGylated lipid is between about 0.5 mole % to 1.5 mole %, wherein the sum of the content of the cationic lipid, of the sterol compound and of the PEGylated lipid for the lipid composition is 100 mole %. In some embodiments, the cationic lipid is about 70 mole %, the content of the sterol compound is about 29 mole % and the content of the PEGylated lipid is about 1 mole %. In some embodiments, the LNP is 70 mole % of Formula III, 29 mole % of cholesterol, and 1 mole % of Formula XI.

### Exosomes

[0689] Exosomes are endogenous nano-vesicles that transport RNAs and proteins, and which can deliver RNA to the brain and other target organs. To reduce immunogenicity, Alvarez-Erviti et al. (2011, Nat Biotechnol 29: 341) used self-derived dendritic cells for exosome production. Targeting to the brain was achieved by engineering the dendritic cells to express Lamp2b, an exosomal membrane protein, fused to the neuron-specific RVG peptide. Purified exosomes were loaded with exogenous RNA by electroporation. Intravenously injected RVG-targeted exosomes delivered GAPDH siRNA specifically to neurons, microglia, oligodendrocytes in the brain, resulting in a specific gene knockdown. Pre-exposure to RVG exosomes did not attenuate knockdown, and non-specific uptake in other tissues was not observed. The therapeutic potential of exosome-mediated siRNA delivery was demonstrated by the strong mRNA (60%) and protein (62%) knockdown of BACE1, a therapeutic target in Alzheimer's disease.

[0690] To obtain a pool of immunologically inert exosomes, Alvarez-Erviti et al. harvested bone marrow from inbred C57BL/6 mice with a homogenous major histocompatibility complex (MHC) haplotype. As immature dendritic cells produce large quantities of exosomes devoid of T-cell activators such as MHC-II and CD86, Alvarez-Erviti et al. selected for dendritic cells with granulocyte/macrophage-colony stimulating factor (GM-CSF) for 7 d. Exosomes were purified from the culture supernatant the following day using well-established ultracentrifugation protocols. The exosomes produced were physically homogenous, with a size distribution peaking at 80 nm in diameter as determined by nanoparticle tracking analysis (NTA) and electron microscopy. Alvarez-Erviti et al. obtained 6-12 μg of exosomes (measured based on protein concentration) per 10⁶ cells.

[0691] Next, Alvarez-Erviti et al. investigated the possibility of loading modified exosomes with exogenous cargoes using electroporation protocols adapted for nanoscale applications. As electroporation for membrane particles at the nanometer scale is not well-characterized, nonspecific Cy5-labeled RNA was used for the empirical optimization of the electroporation protocol. The amount of encapsulated RNA was assayed after ultracentrifugation and lysis of exosomes. Electroporation at 400 V and 125 μF resulted in the greatest retention of RNA and was used for all subsequent experiments.

[0692] Alvarez-Erviti et al. administered 150 μg of each BACE1 siRNA encapsulated in 150 of RVG exosomes to normal C57BL/6 mice and compared the knockdown efficiency to four controls: untreated mice, mice injected with RVG exosomes only, mice injected with BACE1 siRNA complexed to an in vivo cationic liposome reagent and mice injected with BACE1 siRNA complexed to RVG-9R, the RVG peptide conjugated to 9 D-arginines that electrostatically binds to the siRNA. Cortical tissue samples were analyzed 3 d after administration and a significant protein knockdown (45%, P<0.05, versus 62%, P<0.01) in both siRNA-RVG-9R-treated and siRNARVG exosome-treated mice was observed, resulting from a significant decrease in BACE1 mRNA levels (66% [+ or -] 15%, P<0.001 and 61% [+ or -] 13% respectively, P<0.01). Moreover, Applicants demonstrated a significant decrease (55%, P<0.05) in the total [beta]-amyloid 1-42 levels, a main component of the amyloid plaques in Alzheimer's pathology, in the RVG-exosome-treated animals. The decrease observed was greater than the β-amyloid 1-40 decrease demonstrated in normal mice after intraventricular injection of BACE1 inhibitors. Alvarez-Erviti et al. carried out 5′-rapid amplification of cDNA ends (RACE) on BACE1 cleavage product, which provided evidence of RNAi-mediated knockdown by the siRNA.

[0693] Finally, Alvarez-Erviti et al. investigated whether RNA-RVG exosomes induced immune responses in vivo by assessing IL-6, IP-10, TNFα and IFN-α serum concentrations. Following exosome treatment, nonsignificant changes in all cytokines were registered similar to siRNA-transfection reagent treatment in contrast to siRNA-RVG-9R, which potently stimulated IL-6 secretion, confirming the immunologically inert profile of the exosome treatment. Given that exosomes encapsulate only 20% of siRNA, delivery with RVG-exosome appears to be more efficient than RVG-9R delivery as comparable mRNA knockdown and greater protein knockdown was achieved with fivefold less siRNA without the corresponding level of immune stimulation. This experiment demonstrated the therapeutic potential of RVG-exosome technology, which is potentially suited for long-term silencing of genes related to neurodegenerative diseases. The exosome delivery system of Alvarez-Erviti et al. may be applied to deliver the CD-functionalized CRISPR-Cas system of the present invention to therapeutic targets, especially neurodegenerative diseases. A dosage of about 100 to 1000 mg of CRISPR Cas encapsulated in about 100 to 1000 mg of RVG exosomes may be contemplated for the present invention.

[0694] El-Andaloussi et al. (Nature Protocols 7,2112-2126 (2012)) discloses how exosomes derived from cultured cells can be harnessed for delivery of RNA in vitro and in vivo. This protocol first describes the generation of targeted exosomes through transfection of an expression vector, comprising an exosomal protein fused with a peptide ligand. Next, El-Andaloussi et al. explain how to purify and characterize exosomes from transfected cell supernatant. Next, El-Andaloussi et al. detail crucial steps for loading RNA into exosomes. Finally, El-Andaloussi et al. outline how to use exosomes to efficiently deliver RNA in vitro and in vivo in mouse brain. Examples of anticipated results in which exosome-mediated RNA delivery is evaluated by functional assays and imaging are also provided. The entire protocol takes ˜3 weeks. Delivery or administration according to the invention may be performed using exosomes produced from self-derived dendritic cells. From the herein teachings, this can be employed in the practice of the invention.

[0695] In another embodiment, the plasma exosomes of Wahlgren et al. (Nucleic Acids Research, 2012, Vol. 40, No. 17 e130) are contemplated. Exosomes are nano-sized vesicles (30-90 nm in size) produced by many cell types, including dendritic cells (DC), B cells, T cells, mast cells, epithelial cells and tumor cells. These vesicles are formed by inward budding of late endosomes and are then released to the extracellular environment upon fusion with the plasma membrane. Because exosomes naturally carry RNA between cells, this property may be useful in gene therapy, and from this disclosure can be employed in the practice of the instant invention.

[0696] Exosomes from plasma can be prepared by centrifugation of buffy coat at 900 g for 20 min to isolate the plasma followed by harvesting cell supernatants, centrifuging at 300 g for 10 min to eliminate cells and at 16 500 g for 30 min followed by filtration through a 0.22 mm filter. Exosomes are pelleted by ultracentrifugation at 120 000 g for 70 min. Chemical transfection of siRNA into exosomes is carried out according to the manufacturer's instructions in RNAi Human/Mouse Starter Kit (Quiagen, Hilden, Germany). siRNA is added to 100 ml PBS at a final concentration of 2 mmol/ml. After adding HiPerFect transfection reagent, the mixture is incubated for 10 min at RT. In order to remove the excess of micelles, the exosomes are re-isolated using aldehyde/sulfate latex beads. The chemical transfection of CRISPR Cas into exosomes may be conducted similarly to siRNA. The exosomes may be co-cultured with monocytes and lymphocytes isolated from the peripheral blood of healthy donors. Therefore, it may be contemplated that exosomes containing CRISPR Cas may be introduced to monocytes and lymphocytes of and autologously reintroduced into a human. Accordingly, delivery or administration according to the invention may be performed using plasma exosomes.

### Liposomes

[0697] Delivery or administration according to the invention can be performed with liposomes. Liposomes are spherical vesicle structures composed of a uni- or multilamellar lipid bilayer surrounding internal aqueous compartments and a relatively impermeable outer lipophilic phospholipid bilayer. Liposomes have gained considerable attention as drug delivery carriers because they are biocompatible, nontoxic, can deliver both hydrophilic and lipophilic drug molecules, protect their cargo from degradation by plasma enzymes, and transport their load across biological membranes and the blood brain barrier (BBB) (see, e.g., Spuch and Navarro, Journal of Drug Delivery, vol. 2011, Article ID 469679, 12 pages, 2011. doi:10.1155/2011/469679 for review).

[0698] Liposomes can be made from several different types of lipids; however, phospholipids are most commonly used to generate liposomes as drug carriers. Although liposome formation is spontaneous when a lipid film is mixed with an aqueous solution, it can also be expedited by applying force in the form of shaking by using a homogenizer, sonicator, or an extrusion apparatus (see, e.g., Spuch and Navarro, Journal of Drug Delivery, vol. 2011, Article ID 469679, 12 pages, 2011. doi:10.1155/2011/469679 for review).

[0699] Several other additives may be added to liposomes in order to modify their structure and properties. For instance, either cholesterol or sphingomyelin may be added to the liposomal mixture in order to help stabilize the liposomal structure and to prevent the leakage of the liposomal inner cargo. Further, liposomes are prepared from hydrogenated egg phosphatidylcholine or egg phosphatidylcholine, cholesterol, and dicetyl phosphate, and their mean vesicle sizes were adjusted to about 50 and 100 nm. (see, e.g., Spuch and Navarro, Journal of Drug Delivery, vol. 2011, Article ID 469679, 12 pages, 2011. doi:10.1155/2011/469679 for review).

[0700] A liposome formulation may be mainly comprised of natural phospholipids and lipids such as 1,2-distearoryl-sn-glycero-3-phosphatidyl choline (DSPC), sphingomyelin, egg phosphatidylcholines and monosialoganglioside. Since this formulation is made up of phospholipids only, liposomal formulations have encountered many challenges, one of the ones being the instability in plasma. Several attempts to overcome these challenges have been made, specifically in the manipulation of the lipid membrane. One of these attempts focused on the manipulation of cholesterol. Addition of cholesterol to conventional formulations reduces rapid release of the encapsulated bioactive compound into the plasma or 1,2-dioleoyl-sn-glycero-3-phosphoethanolamine (DOPE) increases the stability (see, e.g., Spuch and Navarro, Journal of Drug Delivery, vol. 2011, Article ID 469679, 12 pages, 2011. doi:10.1155/2011/469679 for review).

[0701] In a particularly advantageous embodiment, Trojan Horse liposomes (also known as Molecular Trojan Horses) are desirable and protocols may be found at http://cshprotocols.cshlp.org/content/2010/4/pdb.prot5407.long. These particles allow delivery of a transgene to the entire brain after an intravascular injection. Without being bound by limitation, it is believed that neutral lipid particles with specific antibodies conjugated to surface allow crossing of the blood brain barrier via endocytosis. Trojan Horse Liposomes may be used to deliver the CRISPR family of nucleases to the brain via an intravascular injection, which would allow whole brain transgenic animals without the need for embryonic manipulation. About 1-5 g of DNA or RNA may be contemplated for in vivo administration in liposomes.

[0702] In another embodiment, the CD-functionalized CRISPR Cas system or components thereof may be administered in liposomes, such as a stable nucleic-acid-lipid particle (SNALP) (see, e.g., Morrissey et al., Nature Biotechnology, Vol. 23, No. 8, August 2005). Daily intravenous injections of about 1, 3 or 5 mg/kg/day of a specific CRISPR Cas targeted in a SNALP are contemplated. The daily treatment may be over about three days and then weekly for about five weeks. In another embodiment, a specific CRISPR Cas encapsulated SNALP) administered by intravenous injection to at doses of about 1 or 2.5 mg/kg are also contemplated (see, e.g., Zimmerman et al., Nature Letters, Vol. 441, 4 May 2006). The SNALP formulation may contain the lipids 3-N-[(wmethoxypoly(ethylene glycol) 2000) carbamoyl]-1,2-dimyristyloxy-propylamine (PEG-C-DMA), 1,2-dilinoleyloxy-N,N-dimethyl-3-aminopropane (DLinDMA), 1,2-di stearoyl-sn-glycero-3-phosphocholine (DSPC) and cholesterol, in a 2:40:10:48 molar percent ratio (see, e.g., Zimmerman et al., Nature Letters, Vol. 441, 4 May 2006).

[0703] In another embodiment, stable nucleic-acid-lipid particles (SNALPs) have proven to be effective delivery molecules to highly vascularized HepG2-derived liver tumors but not in poorly vascularized HCT-116 derived liver tumors (see, e.g., Li, Gene Therapy (2012) 19, 775-780). The SNALP liposomes may be prepared by formulating D-Lin-DMA and PEG-C-DMA with distearoylphosphatidylcholine (DSPC), Cholesterol and siRNA using a 25:1 lipid/siRNA ratio and a 48/40/10/2 molar ratio of Cholesterol/D-Lin-DMA/DSPC/PEG-C-DMA. The resulted SNALP liposomes are about 80-100 nm in size.

[0704] In yet another embodiment, a SNALP may comprise synthetic cholesterol (Sigma-Aldrich, St Louis, Mo., USA), dipalmitoylphosphatidylcholine (Avanti Polar Lipids, Alabaster, Ala., USA), 3-N-[(w-methoxy poly(ethylene glycol)2000)carbamoyl]-1,2-dimyrestyloxypropylamine, and cationic 1,2-dilinoleyloxy-3-N,Ndimethylaminopropane (see, e.g., Geisbert et al., Lancet 2010; 375: 1896-905). A dosage of about 2 mg/kg total CRISPR Cas per dose administered as, for example, a bolus intravenous infusion may be contemplated.

[0705] In yet another embodiment, a SNALP may comprise synthetic cholesterol (Sigma-Aldrich), 1,2-distearoyl-sn-glycero-3-phosphocholine (DSPC; Avanti Polar Lipids Inc.), PEG-cDMA, and 1,2-dilinoleyloxy-3-(N;N-dimethyl)aminopropane (DLinDMA) (see, e.g., Judge, J. Clin. Invest. 119:661-673 (2009)). Formulations used for in vivo studies may comprise a final lipid/RNA mass ratio of about 9:1.

[0706] The safety profile of RNAi nanomedicines has been reviewed by Barros and Gollob of Alnylam Pharmaceuticals (see, e.g., Advanced Drug Delivery Reviews 64 (2012) 1730-1737). The stable nucleic acid lipid particle (SNALP) is comprised of four different lipids—an ionizable lipid (DLinDMA) that is cationic at low pH, a neutral helper lipid, cholesterol, and a diffusible polyethylene glycol (PEG)-lipid. The particle is approximately 80 nm in diameter and is charge-neutral at physiologic pH. During formulation, the ionizable lipid serves to condense lipid with the anionic RNA during particle formation. When positively charged under increasingly acidic endosomal conditions, the ionizable lipid also mediates the fusion of SNALP with the endosomal membrane enabling release of RNA into the cytoplasm. The PEG-lipid stabilizes the particle and reduces aggregation during formulation, and subsequently provides a neutral hydrophilic exterior that improves pharmacokinetic properties.

[0707] To date, two clinical programs have been initiated using SNALP formulations with RNA. Tekmira Pharmaceuticals recently completed a phase I single-dose study of SNALP-ApoB in adult volunteers with elevated LDL cholesterol. ApoB is predominantly expressed in the liver and jejunum and is essential for the assembly and secretion of VLDL and LDL. Seventeen subjects received a single dose of SNALP-ApoB (dose escalation across 7 dose levels). There was no evidence of liver toxicity (anticipated as the potential dose-limiting toxicity based on preclinical studies). One (of two) subjects at the highest dose experienced flu-like symptoms consistent with immune system stimulation, and the decision was made to conclude the trial.

[0708] Alnylam Pharmaceuticals has similarly advanced ALN-TTR01, which employs the SNALP technology described above and targets hepatocyte production of both mutant and wild-type TTR to treat TTR amyloidosis (ATTR). Three ATTR syndromes have been described: familial amyloidotic polyneuropathy (FAP) and familial amyloidotic cardiomyopathy (FAC) both caused by autosomal dominant mutations in TTR; and senile systemic amyloidosis (SSA) cause by wildtype TTR. A placebo-controlled, single dose-escalation phase I trial of ALN-TTR01 was recently completed in patients with ATTR. ALN-TTR01 was administered as a 15-minute IV infusion to 31 patients (23 with study drug and 8 with placebo) within a dose range of 0.01 to 1.0 mg/kg (based on siRNA). Treatment was well tolerated with no significant increases in liver function tests. Infusion-related reactions were noted in 3 of 23 patients at ≥0.4 mg/kg; all responded to slowing of the infusion rate and all continued on study. Minimal and transient elevations of serum cytokines IL-6, IP-10 and IL-1ra were noted in two patients at the highest dose of 1 mg/kg (as anticipated from preclinical and NHP studies). Lowering of serum TTR, the expected pharmacodynamics effect of ALN-TTR01, was observed at 1 mg/kg.

[0709] In yet another embodiment, a SNALP may be made by solubilizing a cationic lipid, DSPC, cholesterol and PEG-lipid e.g., in ethanol, e.g., at a molar ratio of 40:10:40:10, respectively (see, Semple et al., Nature Niotechnology, Volume 28 Number 2 Feb. 2010, pp. 172-177). The lipid mixture was added to an aqueous buffer (50 mM citrate, pH 4) with mixing to a final ethanol and lipid concentration of 30% (vol/vol) and 6.1 mg/ml, respectively, and allowed to equilibrate at 22° C. for 2 min before extrusion. The hydrated lipids were extruded through two stacked 80 nm pore-sized filters (Nuclepore) at 22° C. using a Lipex Extruder (Northern Lipids) until a vesicle diameter of 70-90 nm, as determined by dynamic light scattering analysis, was obtained. This generally required 1-3 passes. The siRNA (solubilized in a 50 mM citrate, pH 4 aqueous solution containing 30% ethanol) was added to the pre-equilibrated (35° C.) vesicles at a rate of ˜5 ml/min with mixing. After a final target siRNA/lipid ratio of 0.06 (wt/wt) was reached, the mixture was incubated for a further 30 min at 35° C. to allow vesicle reorganization and encapsulation of the siRNA. The ethanol was then removed and the external buffer replaced with PBS (155 mM NaCl, 3 mM Na₂HPO₄, 1 mM KH₂PO₄, pH 7.5) by either dialysis or tangential flow diafiltration. siRNA were encapsulated in SNALP using a controlled step-wise dilution method process. The lipid constituents of KC2-SNALP were DLin-KC2-DMA (cationic lipid), dipalmitoylphosphatidylcholine (DPPC; Avanti Polar Lipids), synthetic cholesterol (Sigma) and PEG-C-DMA used at a molar ratio of 57.1:7.1:34.3:1.4. Upon formation of the loaded particles, SNALP were dialyzed against PBS and filter sterilized through a 0.2 μm filter before use. Mean particle sizes were 75-85 nm and 90-95% of the siRNA was encapsulated within the lipid particles. The final siRNA/lipid ratio in formulations used for in vivo testing was ˜0.15 (wt/wt). LNP-siRNA systems containing Factor VII siRNA were diluted to the appropriate concentrations in sterile PBS immediately before use and the formulations were administered intravenously through the lateral tail vein in a total volume of 10 ml/kg. This method and these delivery systems may be extrapolated to the CD-functionalized CRISPR Cas system of the present invention.

### Other Lipids

[0710] Other cationic lipids, such as amino lipid 2,2-dilinoleyl-4-dimethylaminoethyl-[1,3]-dioxolane (DLin-KC2-DMA) may be utilized to encapsulate CRISPR Cas or components thereof or nucleic acid molecule(s) coding therefor e.g., similar to SiRNA (see, e.g., Jayaraman, Angew. Chem. Int. Ed. 2012, 51, 8529-8533), and hence may be employed in the practice of the invention. A preformed vesicle with the following lipid composition may be contemplated: amino lipid, distearoylphosphatidylcholine (DSPC), cholesterol and (R)-2,3-bis(octadecyloxy) propyl-1-(methoxy poly(ethylene glycol)2000)propylcarbamate (PEG-lipid) in the molar ratio 40/10/40/10, respectively, and a FVII siRNA/total lipid ratio of approximately 0.05 (w/w). To ensure a narrow particle size distribution in the range of 70-90 nm and a low polydispersity index of 0.11±0.04 (n=56), the particles may be extruded up to three times through 80 nm membranes prior to adding the guide RNA. Particles containing the highly potent amino lipid 16 may be used, in which the molar ratio of the four lipid components 16, DSPC, cholesterol and PEG-lipid (50/10/38.5/1.5) which may be further optimized to enhance in vivo activity.

[0711] Michael S D Kormann et al. (“Expression of therapeutic proteins after delivery of chemically modified mRNA in mice: Nature Biotechnology, Volume: 29, Pages: 154-157 (2011)) describes the use of lipid envelopes to deliver RNA. Use of lipid envelopes is also preferred in the present invention.

[0712] In another embodiment, lipids may be formulated with the CD-functionalized CRISPR Cas system of the present invention or component(s) thereof or nucleic acid molecule(s) coding therefor to form lipid nanoparticles (LNPs). Lipids include, but are not limited to, DLin-KC2-DMA4, C12-200 and colipids disteroylphosphatidyl choline, cholesterol, and PEG-DMG may be formulated with CRISPR Cas instead of siRNA (see, e.g., Novobrantseva, Molecular Therapy—Nucleic Acids (2012) 1, e4; doi:10.1038/mtna.2011.3) using a spontaneous vesicle formation procedure. The component molar ratio may be about 50/10/38.5/1.5 (DLin-KC2-DMA or C12-200/disteroylphosphatidyl choline/cholesterol/PEG-DMG). The final lipid: siRNA weight ratio may be ˜12:1 and 9:1 in the case of DLin-KC2-DMA and C12-200 lipid nanoparticles (LNPs), respectively. The formulations may have mean particle diameters of ˜80 nm with >90% entrapment efficiency. A 3 mg/kg dose may be contemplated.

[0713] Tekmira has a portfolio of approximately 95 patent families, in the U.S. and abroad, that are directed to various aspects of LNPs and LNP formulations (see, e.g., U.S. Pat. Nos. 7,982,027; 7,799,565; 8,058,069; 8,283,333; 7,901,708; 7,745,651; 7,803,397; 8,101,741; 8,188,263; 7,915,399; 8,236,943 and 7,838,658 and European Pat. Nos 1766035; 1519714; 1781593 and 1664316), all of which may be used and/or adapted to the present invention.

[0714] The CD-functionalized CRISPR Cas system or components thereof or nucleic acid molecule(s) coding therefor may be delivered encapsulated in PLGA Microspheres such as that further described in US published applications 20130252281 and 20130245107 and 20130244279 (assigned to Moderna Therapeutics) which relate to aspects of formulation of compositions comprising modified nucleic acid molecules which may encode a protein, a protein precursor, or a partially or fully processed form of the protein or a protein precursor. The formulation may have a molar ratio 50:10:38.5:1.5-3.0 (cationic lipid:fusogenic lipid:cholesterol:PEG lipid). The PEG lipid may be selected from, but is not limited to PEG-c-DOMG, PEG-DMG. The fusogenic lipid may be DSPC. See also, Schrum et al., Delivery and Formulation of Engineered Nucleic Acids, US published application 20120251618.

[0715] Nanomerics' technology addresses bioavailability challenges for a broad range of therapeutics, including low molecular weight hydrophobic drugs, peptides, and nucleic acid based therapeutics (plasmid, siRNA, miRNA). Specific administration routes for which the technology has demonstrated clear advantages include the oral route, transport across the blood-brain-barrier, delivery to solid tumours, as well as to the eye. See, e.g., Mazza et al., 2013, ACS Nano. 2013 Feb. 26; 7(2):1016-26; Uchegbu and Siew, 2013, J Pharm Sci. 102(2):305-10 and Lalatsa et al., 2012, J Control Release. 2012 Jul. 20; 161(2):523-36.

[0716] US Patent Publication No. 20050019923 describes cationic dendrimers for delivering bioactive molecules, such as polynucleotide molecules, peptides and polypeptides and/or pharmaceutical agents, to a mammalian body. The dendrimers are suitable for targeting the delivery of the bioactive molecules to, for example, the liver, spleen, lung, kidney or heart (or even the brain). Dendrimers are synthetic 3-dimensional macromolecules that are prepared in a step-wise fashion from simple branched monomer units, the nature and functionality of which can be easily controlled and varied. Dendrimers are synthesised from the repeated addition of building blocks to a multifunctional core (divergent approach to synthesis), or towards a multifunctional core (convergent approach to synthesis) and each addition of a 3-dimensional shell of building blocks leads to the formation of a higher generation of the dendrimers. Polypropylenimine dendrimers start from a diaminobutane core to which is added twice the number of amino groups by a double Michael addition of acrylonitrile to the primary amines followed by the hydrogenation of the nitriles. This results in a doubling of the amino groups. Polypropylenimine dendrimers contain 100% protonable nitrogens and up to 64 terminal amino groups (generation 5, DAB 64). Protonable groups are usually amine groups which are able to accept protons at neutral pH. The use of dendrimers as gene delivery agents has largely focused on the use of the polyamidoamine. and phosphorous containing compounds with a mixture of amine/amide or N-P(O₂)S as the conjugating units respectively with no work being reported on the use of the lower generation polypropylenimine dendrimers for gene delivery. Polypropylenimine dendrimers have also been studied as pH sensitive controlled release systems for drug delivery and for their encapsulation of guest molecules when chemically modified by peripheral amino acid groups. The cytotoxicity and interaction of polypropylenimine dendrimers with DNA as well as the transfection efficacy of DAB 64 has also been studied.

[0717] US Patent Publication No. 20050019923 is based upon the observation that, contrary to earlier reports, cationic dendrimers, such as polypropylenimine dendrimers, display suitable properties, such as specific targeting and low toxicity, for use in the targeted delivery of bioactive molecules, such as genetic material. In addition, derivatives of the cationic dendrimer also display suitable properties for the targeted delivery of bioactive molecules. See also, Bioactive Polymers, US published application 20080267903, which discloses “Various polymers, including cationic polyamine polymers and dendrimeric polymers, are shown to possess anti-proliferative activity, and may therefore be useful for treatment of disorders characterised by undesirable cellular proliferation such as neoplasms and tumours, inflammatory disorders (including autoimmune disorders), psoriasis and atherosclerosis. The polymers may be used alone as active agents, or as delivery vehicles for other therapeutic agents, such as drug molecules or nucleic acids for gene therapy. In such cases, the polymers' own intrinsic anti-tumour activity may complement the activity of the agent to be delivered.” The disclosures of these patent publications may be employed in conjunction with herein teachings for delivery of CD-functionalized CRISPR Cas system(s) or component(s) thereof or nucleic acid molecule(s) coding therefor.

### Supercharged Proteins

[0718] Supercharged proteins are a class of engineered or naturally occurring proteins with unusually high positive or negative net theoretical charge and may be employed in delivery of CD-functionalized CRISPR Cas system(s) or component(s) thereof or nucleic acid molecule(s) coding therefor. Both supernegatively and superpositively charged proteins exhibit a remarkable ability to withstand thermally or chemically induced aggregation. Superpositively charged proteins are also able to penetrate mammalian cells. Associating cargo with these proteins, such as plasmid DNA, RNA, or other proteins, can enable the functional delivery of these macromolecules into mammalian cells both in vitro and in vivo. The creation and characterization of supercharged proteins has been reported in 2007 (Lawrence et al., 2007, Journal of the American Chemical Society 129, 10110-10112).

[0719] The nonviral delivery of RNA and plasmid DNA into mammalian cells are valuable both for research and therapeutic applications (Akinc et al., 2010, Nat. Biotech. 26, 561-569). Purified +36 GFP protein (or other superpositively charged protein) is mixed with RNAs in the appropriate serum-free media and allowed to complex prior addition to cells. Inclusion of serum at this stage inhibits formation of the supercharged protein-RNA complexes and reduces the effectiveness of the treatment. The following protocol has been found to be effective for a variety of cell lines (McNaughton et al., 2009, Proc. Natl. Acad. Sci. USA 106, 6111-6116) (However, pilot experiments varying the dose of protein and RNA should be performed to optimize the procedure for specific cell lines): (1) One day before treatment, plate 1×10⁵ cells per well in a 48-well plate. (2) On the day of treatment, dilute purified +36 GFP protein in serumfree media to a final concentration 200 nM. Add RNA to a final concentration of 50 nM. Vortex to mix and incubate at room temperature for 10 min. (3) During incubation, aspirate media from cells and wash once with PBS. (4) Following incubation of +36 GFP and RNA, add the protein-RNA complexes to cells. (5) Incubate cells with complexes at 37° C. for 4 h. (6) Following incubation, aspirate the media and wash three times with 20 U/mL heparin PBS. Incubate cells with serum-containing media for a further 48 h or longer depending upon the assay for activity. (7) Analyze cells by immunoblot, qPCR, phenotypic assay, or other appropriate method.

[0720] It has been further found +36 GFP to be an effective plasmid delivery reagent in a range of cells. As plasmid DNA is a larger cargo than siRNA, proportionately more +36 GFP protein is required to effectively complex plasmids. For effective plasmid delivery Applicants have developed a variant of +36 GFP bearing a C-terminal HA2 peptide tag, a known endosome-disrupting peptide derived from the influenza virus hemagglutinin protein. The following protocol has been effective in a variety of cells, but as above it is advised that plasmid DNA and supercharged protein doses be optimized for specific cell lines and delivery applications: (1) One day before treatment, plate 1×10⁵ per well in a 48-well plate. (2) On the day of treatment, dilute purified [symbol] 36 GFP protein in serumfree media to a final concentration 2 mM. Add 1 mg of plasmid DNA. Vortex to mix and incubate at room temperature for 10 min. (3) During incubation, aspirate media from cells and wash once with PBS. (4) Following incubation of [symbol] 36 GFP and plasmid DNA, gently add the protein-DNA complexes to cells. (5) Incubate cells with complexes at 37 C for 4 h. (6) Following incubation, aspirate the media and wash with PBS. Incubate cells in serum-containing media and incubate for a further 24-48 h. (7) Analyze plasmid delivery (e.g., by plasmid-driven gene expression) as appropriate.

[0721] See also, e.g., McNaughton et al., Proc. Natl. Acad. Sci. USA 106, 6111-6116 (2009); Cronican et al., ACS Chemical Biology 5, 747-752 (2010); Cronican et al., Chemistry & Biology 18, 833-838 (2011); Thompson et al., Methods in Enzymology 503, 293-319 (2012); Thompson, D. B., et al., Chemistry & Biology 19 (7), 831-843 (2012). The methods of the super charged proteins may be used and/or adapted for delivery of the CD-functionalized CRISPR Cas system of the present invention. These systems in conjunction with herein teaching can be employed in the delivery of CD-functionalized CRISPR Cas system(s) or component(s) thereof or nucleic acid molecule(s) coding therefor

### Cell Penetrating Peptides (CPPs)

[0722] In yet another embodiment, cell penetrating peptides (CPPs) are contemplated for the delivery of the CD-functionalized CRISPR Cas system. CPPs are short peptides that facilitate cellular uptake of various molecular cargo (from nanosize particles to small chemical molecules and large fragments of DNA). The term “cargo” as used herein includes but is not limited to the group consisting of therapeutic agents, diagnostic probes, peptides, nucleic acids, antisense oligonucleotides, plasmids, proteins, particles, including nanoparticles, liposomes, chromophores, small molecules and radioactive materials. In aspects of the invention, the cargo may also comprise any component of the CD-functionalized CRISPR Cas system or the entire CD-functionalized functional CRISPR Cas system. Aspects of the present invention further provide methods for delivering a desired cargo into a subject comprising: (a) preparing a complex comprising the cell penetrating peptide of the present invention and a desired cargo, and (b) orally, intraarticularly, intraperitoneally, intrathecally, intrarterially, intranasally, intraparenchymally, subcutaneously, intramuscularly, intravenously, dermally, intrarectally, or topically administering the complex to a subject. The cargo is associated with the peptides either through chemical linkage via covalent bonds or through non-covalent interactions.

[0723] The function of the CPPs are to deliver the cargo into cells, a process that commonly occurs through endocytosis with the cargo delivered to the endosomes of living mammalian cells. Cell-penetrating peptides are of different sizes, amino acid sequences, and charges but all CPPs have one distinct characteristic, which is the ability to translocate the plasma membrane and facilitate the delivery of various molecular cargoes to the cytoplasm or an organelle. CPP translocation may be classified into three main entry mechanisms: direct penetration in the membrane, endocytosis-mediated entry, and translocation through the formation of a transitory structure. CPPs have found numerous applications in medicine as drug delivery agents in the treatment of different diseases including cancer and virus inhibitors, as well as contrast agents for cell labeling. Examples of the latter include acting as a carrier for GFP, MRI contrast agents, or quantum dots. CPPs hold great potential as in vitro and in vivo delivery vectors for use in research and medicine. CPPs typically have an amino acid composition that either contains a high relative abundance of positively charged amino acids such as lysine or arginine or has sequences that contain an alternating pattern of polar/charged amino acids and non-polar, hydrophobic amino acids. These two types of structures are referred to as polycationic or amphipathic, respectively. A third class of CPPs are the hydrophobic peptides, containing only apolar residues, with low net charge or have hydrophobic amino acid groups that are crucial for cellular uptake. One of the initial CPPs discovered was the trans-activating transcriptional activator (Tat) from Human Immunodeficiency Virus 1 (HIV-1) which was found to be efficiently taken up from the surrounding media by numerous cell types in culture. Since then, the number of known CPPs has expanded considerably and small molecule synthetic analogues with more effective protein transduction properties have been generated. CPPs include but are not limited to Penetratin, Tat (48-60), Transportan, and (R-AhX-R4) (Ahx=aminohexanoyl).

[0724] U.S. Pat. No. 8,372,951, provides a CPP derived from eosinophil cationic protein (ECP) which exhibits highly cell-penetrating efficiency and low toxicity. Aspects of delivering the CPP with its cargo into a vertebrate subject are also provided. Further aspects of CPPs and their delivery are described in U.S. Pat. Nos. 8,575,305; 8,614,194 and 8,044,019. CPPs can be used to deliver the CD-functionalized CRISPR-Cas system or components thereof. That CPPs can be employed to deliver the CD-functionalized CRISPR-Cas system or components thereof is also provided in the manuscript “Gene disruption by cell-penetrating peptide-mediated delivery of Cas9 protein and guide RNA”, by Suresh Ramakrishna, Abu-Bonsrah Kwaku Dad, Jagadish Beloor, et al. Genome Res. 2014 Apr. 2, incorporated by reference in its entirety, wherein it is demonstrated that treatment with CPP-conjugated recombinant Cas9 protein and CPP-complexed guide RNAs lead to endogenous gene disruptions in human cell lines. In the paper the Cas9 protein was conjugated to CPP via a thioether bond, whereas the guide RNA was complexed with CPP, forming condensed, positively charged particles. It was shown that simultaneous and sequential treatment of human cells, including embryonic stem cells, dermal fibroblasts, HEK293T cells, HeLa cells, and embryonic carcinoma cells, with the modified Cas9 and guide RNA led to efficient gene disruptions with reduced off-target mutations relative to plasmid transfections.

### Aerosol Delivery

[0725] Subjects treated for a lung disease may for example receive pharmaceutically effective amount of aerosolized AAV vector system per lung endobronchially delivered while spontaneously breathing. As such, aerosolized delivery is preferred for AAV delivery in general. An adenovirus or an AAV particle may be used for delivery. Suitable gene constructs, each operably linked to one or more regulatory sequences, may be cloned into the delivery vector.

### Packaging and Promoters

[0726] The promoter used to drive CRISPR-Cas protein and cytidine deaminase coding nucleic acid molecule expression can include AAV ITR, which can serve as a promoter. This is advantageous for eliminating the need for an additional promoter element (which can take up space in the vector). The additional space freed up can be used to drive the expression of additional elements (gRNA, etc.). Also, ITR activity is relatively weaker, so can be used to reduce potential toxicity due to over expression of Cas13.

[0727] For ubiquitous expression, promoters that can be used include: CMV, CAG, CBh, PGK, SV40, Ferritin heavy or light chains, etc. For brain or other CNS expression, SynapsinI can be used for all neurons, CaMKIIalpha can be used for excitatory neurons, GAD67 or GAD65 or VGAT can be used for GABAergic neurons. For liver expression, Albumin promoter can be used. For lung expression, SP-B can be used. For endothelial cells, ICAM can be used. For hematopoietic cells, IFNbeta or CD45 can be used. For Osteoblasts, the OG-2 can be used.

[0728] The promoter used to drive guide RNA can include Pol III promoters such as U6 or H1, as well as use of Pol II promoter and intronic cassettes to express guide RNA.

### Adeno Associated Virus (AAV)

[0729] The CRISPR-Cas protein, cytidine deaminase, and one or more guide RNA can be delivered using adeno associated virus (AAV), lentivirus, adenovirus or other plasmid or viral vector types, in particular, using formulations and doses from, for example, U.S. Pat. No. 8,454,972 (formulations, doses for adenovirus), U.S. Pat. No. 8,404,658 (formulations, doses for AAV) and U.S. Pat. No. 5,846,946 (formulations, doses for DNA plasmids) and from clinical trials and publications regarding the clinical trials involving lentivirus, AAV and adenovirus. For examples, for AAV, the route of administration, formulation and dose can be as in U.S. Pat. No. 8,454,972 and as in clinical trials involving AAV. For Adenovirus, the route of administration, formulation and dose can be as in U.S. Pat. No. 8,404,658 and as in clinical trials involving adenovirus. For plasmid delivery, the route of administration, formulation and dose can be as in U.S. Pat. No. 5,846,946 and as in clinical studies involving plasmids. Doses may be based on or extrapolated to an average 70 kg individual (e.g. a male adult human), and can be adjusted for patients, subjects, mammals of different weight and species. Frequency of administration is within the ambit of the medical or veterinary practitioner (e.g., physician, veterinarian), depending on usual factors including the age, sex, general health, other conditions of the patient or subject and the particular condition or symptoms being addressed. The viral vectors can be injected into the tissue of interest. For cell-type specific genome modification, the expression of Cas13 and cytidine deaminase can be driven by a cell-type specific promoter. For example, liver-specific expression might use the Albumin promoter and neuron-specific expression (e.g. for targeting CNS disorders) might use the Synapsin I promoter.

[0730] In terms of in vivo delivery, AAV is advantageous over other viral vectors for a couple of reasons: low toxicity (this may be due to the purification method not requiring ultra centrifugation of cell particles that can activate the immune response); and low probability of causing insertional mutagenesis because it doesn't integrate into the host genome.

[0731] AAV has a packaging limit of 4.5 or 4.75 Kb. This means that Cas13 as well as a promoter and transcription terminator have to be all fit into the same viral vector. Constructs larger than 4.5 or 4.75 Kb will lead to significantly reduced virus production. SpCas9 is quite large, the gene itself is over 4.1 Kb, which makes it difficult for packing into AAV. Therefore embodiments of the invention include utilizing homologs of Cas13 that are shorter.

[0732] As to AAV, the AAV can be AAV1, AAV2, AAV5 or any combination thereof. One can select the AAV of the AAV with regard to the cells to be targeted; e.g., one can select AAV serotypes 1, 2, 5 or a hybrid capsid AAV1, AAV2, AAV5 or any combination thereof for targeting brain or neuronal cells; and one can select AAV4 for targeting cardiac tissue. AAV8 is useful for delivery to the liver. The herein promoters and vectors are preferred individually. A tabulation of certain AAV serotypes as to these cells (see Grimm, D. et al, J. Virol. 82: 5887-5911 (2008)) is as follows:

| Cell Line | AAV-1 | AAV-2 | AAV-3 | AAV-4 | AAV-5 | AAV-6 | AAV-8 | AAV-9 |
|---|---|---|---|---|---|---|---|---|
| Huh-7 | 13 | 100 | 2.5 | 0.0 | 0.1 | 10 | 0.7 | 0.0 |
| HEK293 | 25 | 100 | 2.5 | 0.1 | 0.1 | 5 | 0.7 | 0.1 |
| HeLa | 3 | 100 | 2.0 | 0.1 | 6.7 | 1 | 0.2 | 0.1 |
| HepG2 | 3 | 100 | 16.7 | 0.3 | 1.7 | 5 | 0.3 | ND |
| Hep1A | 20 | 100 | 0.2 | 1.0 | 0.1 | 1 | 0.2 | 0.0 |
| 911 | 17 | 100 | 11 | 0.2 | 0.1 | 17 | 0.1 | ND |
| CHO | 100 | 100 | 14 | 1.4 | 333 | 50 | 10 | 1.0 |
| COS | 33 | 100 | 33 | 3.3 | 5.0 | 14 | 2.0 | 0.5 |
| MeWo | 10 | 100 | 20 | 0.3 | 6.7 | 10 | 1.0 | 0.2 |
| NIH3T3 | 10 | 100 | 2.9 | 2.9 | 0.3 | 10 | 0.3 | ND |
| A549 | 14 | 100 | 20 | ND | 0.5 | 10 | 0.5 | 0.1 |
| HT1180 | 20 | 100 | 10 | 0.1 | 0.3 | 33 | 0.5 | 0.1 |
| Monocytes | 1111 | 100 | ND | ND | 125 | 1429 | ND | ND |
| Immature DC | 2500 | 100 | ND | ND | 222 | 2857 | ND | ND |
| Mature DC | 2222 | 100 | ND | ND | 333 | 3333 | ND | ND |

### Lentiviruses

[0733] Lentiviruses are complex retroviruses that have the ability to infect and express their genes in both mitotic and post-mitotic cells. The most commonly known lentivirus is the human immunodeficiency virus (HIV), which uses the envelope glycoproteins of other viruses to target a broad range of cell types.

[0734] Lentiviruses may be prepared as follows. After cloning pCasES10 (which contains a lentiviral transfer plasmid backbone), HEK293FT at low passage (p=5) were seeded in a T-75 flask to 50% confluence the day before transfection in DMEM with 10% fetal bovine serum and without antibiotics. After 20 hours, media was changed to OptiMEM (serum-free) media and transfection was done 4 hours later. Cells were transfected with 10 μg of lentiviral transfer plasmid (pCasES10) and the following packaging plasmids: 5 μg of pMD2.G (VSV-g pseudotype), and 7.5 ug of psPAX2 (gag/pol/rev/tat). Transfection was done in 4 mL OptiMEM with a cationic lipid delivery agent (50 uL Lipofectamine 2000 and 100 ul Plus reagent). After 6 hours, the media was changed to antibiotic-free DMEM with 10% fetal bovine serum. These methods use serum during cell culture, but serum-free methods are preferred.

[0735] Lentivirus may be purified as follows. Viral supernatants were harvested after 48 hours. Supernatants were first cleared of debris and filtered through a 0.45 um low protein binding (PVDF) filter. They were then spun in a ultracentrifuge for 2 hours at 24,000 rpm. Viral pellets were resuspended in 50 ul of DMEM overnight at 4 C. They were then aliquotted and immediately frozen at −80° C.

[0736] In another embodiment, minimal non-primate lentiviral vectors based on the equine infectious anemia virus (EIAV) are also contemplated, especially for ocular gene therapy (see, e.g., Balagaan, J Gene Med 2006; 8: 275-285). In another embodiment, RetinoStat®, an equine infectious anemia virus-based lentiviral gene therapy vector that expresses angiostatic proteins endostatin and angiostatin that is delivered via a subretinal injection for the treatment of the web form of age-related macular degeneration is also contemplated (see, e.g., Binley et al., HUMAN GENE THERAPY 23:980-991 (September 2012)) and this vector may be modified for the CD-functionalized CRISPR-Cas system of the present invention.

[0737] In another embodiment, self-inactivating lentiviral vectors with an siRNA targeting a common exon shared by HIV tat/rev, a nucleolar-localizing TAR decoy, and an anti-CCR5-specific hammerhead ribozyme (see, e.g., DiGiusto et al. (2010) Sci Transl Med 2:36ra43) may be used/and or adapted to the CD-functionalized CRISPR-Cas system of the present invention. A minimum of 2.5×106 CD34+cells per kilogram patient weight may be collected and prestimulated for 16 to 20 hours in X-VIVO 15 medium (Lonza) containing 2 μmon-glutamine, stem cell factor (100 ng/ml), Flt-3 ligand (Flt-3L) (100 ng/ml), and thrombopoietin (10 ng/ml) (CellGenix) at a density of 2×106 cells/ml. Prestimulated cells may be transduced with lentiviral at a multiplicity of infection of 5 for 16 to 24 hours in 75-cm2 tissue culture flasks coated with fibronectin (25 mg/cm2) (RetroNectin, Takara Bio Inc.).

[0738] Lentiviral vectors have been disclosed as in the treatment for Parkinson's Disease, see, e.g., US Patent Publication No. 20120295960 and U.S. Pat. Nos. 7,303,910 and 7,351,585. Lentiviral vectors have also been disclosed for the treatment of ocular diseases, see e.g., US Patent Publication Nos. 20060281180, 20090007284, US20110117189; US20090017543; US20070054961, US20100317109. Lentiviral vectors have also been disclosed for delivery to the brain, see, e.g., US Patent Publication Nos. US20110293571; US20110293571, US20040013648, US20070025970, US20090111106 and U.S. Pat. No. 7,259,015.

### Application in Non-Animal Organisms

[0739] The CD-functionalized CRISPR system(s) (e.g., single or multiplexed) can be used in conjunction with recent advances in crop genomics. The systems described herein can be used to perform efficient and cost effective plant gene or genome interrogation or editing or manipulation—for instance, for rapid investigation and/or selection and/or interrogations and/or comparison and/or manipulations and/or transformation of plant genes or genomes; e.g., to create, identify, develop, optimize, or confer trait(s) or characteristic(s) to plant(s) or to transform a plant genome. There can accordingly be improved production of plants, new plants with new combinations of traits or characteristics or new plants with enhanced traits. The CD-functionalized CRISPR system can be used with regard to plants in Site-Directed Integration (SDI) or Gene Editing (GE) or any Near Reverse Breeding (NRB) or Reverse Breeding (RB) techniques. Aspects of utilizing the herein described Cas13 effector protein system may be analogous to the use of the CRISPR-Cas (e.g. CRISPR-Cas9) system in plants, and mention is made of the University of Arizona website “CRISPR-PLANT” (http://www.genome.arizona.edu/crispr/) (supported by Penn State and AGI). Emodiments of the invention can be used in genome editing in plants or where RNAi or similar genome editing techniques have been used previously; see, e.g., Nekrasov, “Plant genome editing made easy: targeted mutagenesis in model and crop plants using the CRISPR-Cas system,” Plant Methods 2013, 9:39 (doi:10.1186/1746-4811-9-39); Brooks, “Efficient gene editing in tomato in the first generation using the CRISPR-Cas9 system,” Plant Physiology September 2014 pp 114.247577; Shan, “Targeted genome modification of crop plants using a CRISPR-Cas system,” Nature Biotechnology 31, 686-688 (2013); Feng, “Efficient genome editing in plants using a CRISPR-Cas system,” Cell Research (2013) 23:1229-1232. doi:10.1038/cr.2013.114; published online 20 Aug. 2013; Xie, “RNA-guided genome editing in plants using a CRISPR-Cas system,” Mol Plant. 2013 November; 6(6):1975-83. doi: 10.1093/mp/sst119. Epub 2013 Aug. 17; Xu, “Gene targeting using the Agrobacterium tumefaciens-mediated CRISPR-Cas system in rice,” Rice 2014, 7:5 (2014), Zhou et al., “Exploiting SNPs for biallelic CRISPR mutations in the outcrossing woody perennial Populus reveals 4-coumarate: CoA ligase specificity and Redundancy,” New Phytologist (2015) (Forum) 1-4 (available online only at www.newphytologist.com); Caliando et al, “Targeted DNA degradation using a CRISPR device stably carried in the host genome, NATURE COMMUNICATIONS 6:6989, DOI: 10.1038/ncomms7989, www.nature.com/naturecommunications DOI: 10.1038/ncomms7989; U.S. Pat. No. 6,603,061—Agrobacterium-Mediated Plant Transformation Method; U.S. Pat. No. 7,868,149—Plant Genome Sequences and Uses Thereof and US 2009/0100536—Transgenic Plants with Enhanced Agronomic Traits, all the contents and disclosure of each of which are herein incorporated by reference in their entirety. In the practice of the invention, the contents and disclosure of Morrell et al “Crop genomics: advances and applications,” Nat Rev Genet. 2011 Dec. 29; 13(2):85-96; each of which is incorporated by reference herein including as to how herein embodiments may be used as to plants. Accordingly, reference herein to animal cells may also apply, mutatis mutandis, to plant cells unless otherwise apparent; and, the enzymes herein having reduced off-target effects and systems employing such enzymes can be used in plant applications, including those mentioned herein.

### Application of CD-Functionalized CRISPR System to Plants and Yeast

[0740] In general, the term “plant” relates to any various photosynthetic, eukaryotic, unicellular or multicellular organism of the kingdom Plantae characteristically growing by cell division, containing chloroplasts, and having cell walls comprised of cellulose. The term plant encompasses monocotyledonous and dicotyledonous plants. Specifically, the plants are intended to comprise without limitation angiosperm and gymnosperm plants such as acacia, alfalfa, amaranth, apple, apricot, artichoke, ash tree, asparagus, avocado, banana, barley, beans, beet, birch, beech, blackberry, blueberry, broccoli, Brussel's sprouts, cabbage, canola, cantaloupe, carrot, cassava, cauliflower, cedar, a cereal, celery, chestnut, cherry, Chinese cabbage, citrus, clementine, clover, coffee, corn, cotton, cowpea, cucumber, cypress, eggplant, elm, endive, eucalyptus, fennel, figs, fir, geranium, grape, grapefruit, groundnuts, ground cherry, gum hemlock, hickory, kale, kiwifruit, kohlrabi, larch, lettuce, leek, lemon, lime, locust, pine, maidenhair, maize, mango, maple, melon, millet, mushroom, mustard, nuts, oak, oats, oil palm, okra, onion, orange, an ornamental plant or flower or tree, papaya, palm, parsley, parsnip, pea, peach, peanut, pear, peat, pepper, persimmon, pigeon pea, pine, pineapple, plantain, plum, pomegranate, potato, pumpkin, radicchio, radish, rapeseed, raspberry, rice, rye, sorghum, safflower, sallow, soybean, spinach, spruce, squash, strawberry, sugar beet, sugarcane, sunflower, sweet potato, sweet corn, tangerine, tea, tobacco, tomato, trees, triticale, turf grasses, turnips, vine, walnut, watercress, watermelon, wheat, yams, yew, and zucchini. The term plant also encompasses Algae, which are mainly photoautotrophs unified primarily by their lack of roots, leaves and other organs that characterize higher plants.

[0741] The methods for genome editing using the CD-functionalized CRISPR system as described herein can be used to confer desired traits on essentially any plant. A wide variety of plants and plant cell systems may be engineered for the desired physiological and agronomic characteristics described herein using the nucleic acid constructs of the present disclosure and the various transformation methods mentioned above. In preferred embodiments, target plants and plant cells for engineering include, but are not limited to, those monocotyledonous and dicotyledonous plants, such as crops including grain crops (e.g., wheat, maize, rice, millet, barley), fruit crops (e.g., tomato, apple, pear, strawberry, orange), forage crops (e.g., alfalfa), root vegetable crops (e.g., carrot, potato, sugar beets, yam), leafy vegetable crops (e.g., lettuce, spinach); flowering plants (e.g., petunia, rose, chrysanthemum), conifers and pine trees (e.g., pine fir, spruce); plants used in phytoremediation (e.g., heavy metal accumulating plants); oil crops (e.g., sunflower, rape seed) and plants used for experimental purposes (e.g., Arabidopsis). Thus, the methods and systems can be used over a broad range of plants, such as for example with dicotyledonous plants belonging to the orders Magniolales, Illiciales, Laurales, Piperales, Aristochiales, Nymphaeales, Ranunculales, Papeverales, Sarraceniaceae, Trochodendrales, Hamamelidales, Eucomiales, Leitneriales, Myricales, Fagales, Casuarinales, Caryophyllales, Batales, Polygonales, Plumbaginales, Dilleniales, Theales, Malvales, Urticales, Lecythidales, Violales, Salicales, Capparales, Ericales, Diapensales, Ebenales, Primulales, Rosales, Fabales, Podostemales, Haloragales, Myrtales, Cornales, Proteales, San tales, Rafflesiales, Celastrales, Euphorbiales, Rhamnales, Sapindales, Juglandales, Geraniales, Polygalales, Umbellales, Gentianales, Polemoniales, Lamiales, Plantaginales, Scrophulariales, Campanulales, Rubiales, Dipsacales, and Asterales; the methods and CRISPR-Cas systems can be used with monocotyledonous plants such as those belonging to the orders Alismatales, Hydrocharitales, Najadales, Triuridales, Commelinales, Eriocaulales, Restionales, Poales, Juncales, Cyperales, Typhales, Bromeliales, Zingiberales, Arecales, Cyclanthales, Pandanales, Arales, Lilliales, and Orchidales, or with plants belonging to Gymnospermae, e.g those belonging to the orders Pinales, Ginkgoales, Cycadales, Araucariales, Cupressales and Gnetales.

[0742] The CD-functionalized CRISPR systems and methods of use described herein can be used over a broad range of plant species, included in the non-limitative list of dicot, monocot or gymnosperm genera hereunder: Atropa, Alseodaphne, Anacardium, Arachis, Beilschmiedia, Brassica, Carthamus, Cocculus, Croton, Cucumis, Citrus, Citrullus, Capsicum, Catharanthus, Cocos, Coffea, Cucurbita, Daucus, Duguetia, Eschscholzia, Ficus, Fragaria, Glaucium, Glycine, Gossypium, Helianthus, Hevea, Hyoscyamus, Lactuca, Landolphia, Linum, Litsea, Lycopersicon, Lupinus, Manihot, Majorana, Malta, Medicago, Nicotiana, Olea, Parthenium, Papaver, Persea, Phaseolus, Pistacia, Pisum, Pyrus, Prunus, Raphanus, Ricinus, Senecio, Sinomenium, Stephania, Sinapis, Solanum, Theobroma, Trifolium, Trigonella, Vicia, Vinca, Vilis, and Vigna; and the genera Allium, Andropogon, Aragrostis, Asparagus, Avena, Cynodon, Elaeis, Festuca, Festulolium, Heterocallis, Hordeum, Lemna, Lolium, Musa, Oryza, Panicum, Pannesetum, Phleum, Poa, Secale, Sorghum, Triticum, Zea, Abies, Cunninghamia, Ephedra, Picea, Pinus, and Pseudotsuga.

[0743] The CD-functionalized CRISPR systems and methods of use can also be used over a broad range of “algae” or “algae cells”; including for example algea selected from several eukaryotic phyla, including the Rhodophyta (red algae), Chlorophyta (green algae), Phaeophyta (brown algae), Bacillariophyta (diatoms), Eustigmatophyta and dinoflagellates as well as the prokaryotic phylum Cyanobacteria (blue-green algae). The term “algae” includes for example algae selected from: Amphora, Anabaena, Anikstrodesmis, Botryococcus, Chaetoceros, Chlamydomonas, Chlorella, Chlorococcum, Cyclotella, Cylindrotheca, Dunaliella, Emiliana, Euglena, Hematococcus, Isochrysis, Monochrysis, Monoraphidium, Nannochloris, Nannnochloropsis, Navicula, Nephrochloris, Nephroselmis, Nitzschia, Nodularia, Nostoc, Oochromonas, Oocystis, Oscillartoria, Pavlova, Phaeodactylum, Playtmonas, Pleurochrysis, Porhyra, Pseudoanabaena, Pyramimonas, Stichococcus, Synechococcus, Synechocystis, Tetraselmis, Thalassiosira, and Trichodesmium.

[0744] A part of a plant, i.e., a “plant tissue” may be treated according to the methods of the present invention to produce an improved plant. Plant tissue also encompasses plant cells. The term “plant cell” as used herein refers to individual units of a living plant, either in an intact whole plant or in an isolated form grown in in vitro tissue cultures, on media or agar, in suspension in a growth media or buffer or as a part of higher organized unites, such as, for example, plant tissue, a plant organ, or a whole plant.

[0745] A “protoplast” refers to a plant cell that has had its protective cell wall completely or partially removed using, for example, mechanical or enzymatic means resulting in an intact biochemical competent unit of living plant that can reform their cell wall, proliferate and regenerate grow into a whole plant under proper growing conditions.

[0746] The term “transformation” broadly refers to the process by which a plant host is genetically modified by the introduction of DNA by means of Agrobacteria or one of a variety of chemical or physical methods. As used herein, the term “plant host” refers to plants, including any cells, tissues, organs, or progeny of the plants. Many suitable plant tissues or plant cells can be transformed and include, but are not limited to, protoplasts, somatic embryos, pollen, leaves, seedlings, stems, calli, stolons, microtubers, and shoots. A plant tissue also refers to any clone of such a plant, seed, progeny, propagule whether generated sexually or asexually, and descendents of any of these, such as cuttings or seed.

[0747] The term “transformed” as used herein, refers to a cell, tissue, organ, or organism into which a foreign DNA molecule, such as a construct, has been introduced. The introduced DNA molecule may be integrated into the genomic DNA of the recipient cell, tissue, organ, or organism such that the introduced DNA molecule is transmitted to the subsequent progeny. In these embodiments, the “transformed” or “transgenic” cell or plant may also include progeny of the cell or plant and progeny produced from a breeding program employing such a transformed plant as a parent in a cross and exhibiting an altered phenotype resulting from the presence of the introduced DNA molecule. Preferably, the transgenic plant is fertile and capable of transmitting the introduced DNA to progeny through sexual reproduction.

[0748] The term “progeny”, such as the progeny of a transgenic plant, is one that is born of, begotten by, or derived from a plant or the transgenic plant. The introduced DNA molecule may also be transiently introduced into the recipient cell such that the introduced DNA molecule is not inherited by subsequent progeny and thus not considered “transgenic”. Accordingly, as used herein, a “non-transgenic” plant or plant cell is a plant which does not contain a foreign DNA stably integrated into its genome.

[0749] The term “plant promoter” as used herein is a promoter capable of initiating transcription in plant cells, whether or not its origin is a plant cell. Exemplary suitable plant promoters include, but are not limited to, those that are obtained from plants, plant viruses, and bacteria such as Agrobacterium or Rhizobium which comprise genes expressed in plant cells.

[0750] As used herein, a “fungal cell” refers to any type of eukaryotic cell within the kingdom of fungi. Phyla within the kingdom of fungi include Ascomycota, Basidiomycota, Blastocladiomycota, Chytridiomycota, Glomeromycota, Microsporidia, and Neocallimastigomycota. Fungal cells may include yeasts, molds, and filamentous fungi. In some embodiments, the fungal cell is a yeast cell.

[0751] As used herein, the term “yeast cell” refers to any fungal cell within the phyla Ascomycota and Basidiomycota. Yeast cells may include budding yeast cells, fission yeast cells, and mold cells. Without being limited to these organisms, many types of yeast used in laboratory and industrial settings are part of the phylum Ascomycota. In some embodiments, the yeast cell is an S. cerervisiae, Kluyveromyces marxianus, or Issatchenkia orientalis cell. Other yeast cells may include without limitation Candida spp. (e.g., Candida albicans), Yarrowia spp. (e.g., Yarrowia lipolytica), Pichia spp. (e.g., Pichia pastoris), Kluyveromyces spp. (e.g., Kluyveromyces lactis and Kluyveromyces marxianus), Neurospora spp. (e.g., Neurospora crassa), Fusarium spp. (e.g., Fusarium oxysporum), and Issatchenkia spp. (e.g., Issatchenkia orientalis, a.k.a. Pichia kudriavzevii and Candida acidothermophilum). In some embodiments, the fungal cell is a filamentous fungal cell. As used herein, the term “filamentous fungal cell” refers to any type of fungal cell that grows in filaments, i.e., hyphae or mycelia. Examples of filamentous fungal cells may include without limitation Aspergillus spp. (e.g., Aspergillus niger), Trichoderma spp. (e.g., Trichoderma reesei), Rhizopus spp. (e.g., Rhizopus oryzae), and Mortierella spp. (e.g., Mortierella isabellina).

[0752] In some embodiments, the fungal cell is an industrial strain. As used herein, “industrial strain” refers to any strain of fungal cell used in or isolated from an industrial process, e.g., production of a product on a commercial or industrial scale. Industrial strain may refer to a fungal species that is typically used in an industrial process, or it may refer to an isolate of a fungal species that may be also used for non-industrial purposes (e.g., laboratory research). Examples of industrial processes may include fermentation (e.g., in production of food or beverage products), distillation, biofuel production, production of a compound, and production of a polypeptide. Examples of industrial strains may include, without limitation, JAY270 and ATCC4124.

[0753] In some embodiments, the fungal cell is a polyploid cell. As used herein, a “polyploid” cell may refer to any cell whose genome is present in more than one copy. A polyploid cell may refer to a type of cell that is naturally found in a polyploid state, or it may refer to a cell that has been induced to exist in a polyploid state (e.g., through specific regulation, alteration, inactivation, activation, or modification of meiosis, cytokinesis, or DNA replication). A polyploid cell may refer to a cell whose entire genome is polyploid, or it may refer to a cell that is polyploid in a particular genomic locus of interest. Without wishing to be bound to theory, it is thought that the abundance of guideRNA may more often be a rate-limiting component in genome engineering of polyploid cells than in haploid cells, and thus the methods using the CD-functionalized CRISPR system described herein may take advantage of using a certain fungal cell type.

[0754] In some embodiments, the fungal cell is a diploid cell. As used herein, a “diploid” cell may refer to any cell whose genome is present in two copies. A diploid cell may refer to a type of cell that is naturally found in a diploid state, or it may refer to a cell that has been induced to exist in a diploid state (e.g., through specific regulation, alteration, inactivation, activation, or modification of meiosis, cytokinesis, or DNA replication). For example, the S. cerevisiae strain S228C may be maintained in a haploid or diploid state. A diploid cell may refer to a cell whose entire genome is diploid, or it may refer to a cell that is diploid in a particular genomic locus of interest. In some embodiments, the fungal cell is a haploid cell. As used herein, a “haploid” cell may refer to any cell whose genome is present in one copy. A haploid cell may refer to a type of cell that is naturally found in a haploid state, or it may refer to a cell that has been induced to exist in a haploid state (e.g., through specific regulation, alteration, inactivation, activation, or modification of meiosis, cytokinesis, or DNA replication). For example, the S. cerevisiae strain S228C may be maintained in a haploid or diploid state. A haploid cell may refer to a cell whose entire genome is haploid, or it may refer to a cell that is haploid in a particular genomic locus of interest.

[0755] As used herein, a “yeast expression vector” refers to a nucleic acid that contains one or more sequences encoding an RNA and/or polypeptide and may further contain any desired elements that control the expression of the nucleic acid(s), as well as any elements that enable the replication and maintenance of the expression vector inside the yeast cell. Many suitable yeast expression vectors and features thereof are known in the art; for example, various vectors and techniques are illustrated in in Yeast Protocols, 2nd edition, Xiao, W., ed. (Humana Press, New York, 2007) and Buckholz, R. G. and Gleeson, M. A. (1991) Biotechnology (NY) 9(11): 1067-72. Yeast vectors may contain, without limitation, a centromeric (CEN) sequence, an autonomous replication sequence (ARS), a promoter, such as an RNA Polymerase III promoter, operably linked to a sequence or gene of interest, a terminator such as an RNA polymerase III terminator, an origin of replication, and a marker gene (e.g., auxotrophic, antibiotic, or other selectable markers). Examples of expression vectors for use in yeast may include plasmids, yeast artificial chromosomes, 2μ plasmids, yeast integrative plasmids, yeast replicative plasmids, shuttle vectors, and episomal plasmids.

### Stable Integration of CD-Functionalized CRISPR System Components in the Genome of Plants and Plant Cells

[0756] In particular embodiments, it is envisaged that the polynucleotides encoding the components of the CD-functionalized CRISPR system are introduced for stable integration into the genome of a plant cell. In these embodiments, the design of the transformation vector or the expression system can be adjusted depending on for when, where and under what conditions the guide RNA and/or fusion protein of cytidine deaminase and Cas13 are expressed.

[0757] In particular embodiments, it is envisaged to introduce the components of the CD-functionalized CRISPR system stably into the genomic DNA of a plant cell. Additionally or alternatively, it is envisaged to introduce the components of the CD-functionalized CRISPR system for stable integration into the DNA of a plant organelle such as, but not limited to a plastid, e mitochondrion or a chloroplast.

[0758] The expression system for stable integration into the genome of a plant cell may contain one or more of the following elements: a promoter element that can be used to express the RNA and/or fusion protein of cytidine deaminase and Cas13 in a plant cell; a 5′ untranslated region to enhance expression; an intron element to further enhance expression in certain cells, such as monocot cells; a multiple-cloning site to provide convenient restriction sites for inserting the guide RNA and/or the fusion protein of cytidine deaminase and Cas13 encoding sequences and other desired elements; and a 3′ untranslated region to provide for efficient termination of the expressed transcript.

[0759] The elements of the expression system may be on one or more expression constructs which are either circular such as a plasmid or transformation vector, or non-circular such as linear double stranded DNA.

[0760] In a particular embodiment, a CD-functionalized CRISPR expression system comprises at least: a nucleotide sequence encoding a guide RNA (gRNA) that hybridizes with a target sequence in a plant, and wherein the guide RNA comprises a guide sequence and a direct repeat sequence, and a nucleotide sequence encoding a fusion protein of cytidine deaminase and Cas13, wherein components (a) or (b) are located on the same or on different constructs, and whereby the different nucleotide sequences can be under control of the same or a different regulatory element operable in a plant cell.

[0761] DNA construct(s) containing the components of the CD-functionalized CRISPR system, and, where applicable, template sequence may be introduced into the genome of a plant, plant part, or plant cell by a variety of conventional techniques. The process generally comprises the steps of selecting a suitable host cell or host tissue, introducing the construct(s) into the host cell or host tissue, and regenerating plant cells or plants therefrom.

[0762] In particular embodiments, the DNA construct may be introduced into the plant cell using techniques such as but not limited to electroporation, microinjection, aerosol beam injection of plant cell protoplasts, or the DNA constructs can be introduced directly to plant tissue using biolistic methods, such as DNA particle bombardment (see also Fu et al., Transgenic Res. 2000 February; 9(1):11-9). The basis of particle bombardment is the acceleration of particles coated with gene/s of interest toward cells, resulting in the penetration of the protoplasm by the particles and typically stable integration into the genome. (see e.g. Klein et al, Nature (1987), Klein et ah, Bio/Technology (1992), Casas et ah, Proc. Natl. Acad. Sci. USA (1993).).

[0763] In particular embodiments, the DNA constructs containing components of the CD-functionalized CRISPR system may be introduced into the plant by Agrobacterium-mediated transformation. The DNA constructs may be combined with suitable T-DNA flanking regions and introduced into a conventional Agrobacterium tumefaciens host vector. The foreign DNA can be incorporated into the genome of plants by infecting the plants or by incubating plant protoplasts with Agrobacterium bacteria, containing one or more Ti (tumor-inducing) plasmids. (see e.g. Fraley et al., (1985), Rogers et al., (1987) and U.S. Pat. No. 5,563,055).

### Plant Promoters

[0764] In order to ensure appropriate expression in a plant cell, the components of the CD-functionalized CRISPR system described herein are typically placed under control of a plant promoter, i.e. a promoter operable in plant cells. The use of different types of promoters is envisaged.

[0765] A constitutive plant promoter is a promoter that is able to express the open reading frame (ORF) that it controls in all or nearly all of the plant tissues during all or nearly all developmental stages of the plant (referred to as “constitutive expression”). One non-limiting example of a constitutive promoter is the cauliflower mosaic virus 35S promoter. “Regulated promoter” refers to promoters that direct gene expression not constitutively, but in a temporally- and/or spatially-regulated manner, and includes tissue-specific, tissue-preferred and inducible promoters. Different promoters may direct the expression of a gene in different tissues or cell types, or at different stages of development, or in response to different environmental conditions. In particular embodiments, one or more of the CD-functionalized CRISPR components are expressed under the control of a constitutive promoter, such as the cauliflower mosaic virus 35S promoter issue-preferred promoters can be utilized to target enhanced expression in certain cell types within a particular plant tissue, for instance vascular cells in leaves or roots or in specific cells of the seed. Examples of particular promoters for use in the CD-functionalized CRISPR system are found in Kawamata et al., (1997) Plant Cell Physiol 38:792-803; Yamamoto et al., (1997) Plant J 12:255-65; Hire et al, (1992) Plant Mol Biol 20:207-18, Kuster et al, (1995) Plant Mol Biol 29:759-72, and Capana et al., (1994) Plant Mol Biol 25:681-91.

[0766] Inducible promoters can be of interest to express one or more of the components of the CD-functionalized CRISPR system under limited circumstances to avoid non-specific activity of the deaminase. In particular embodiments, one or more elements of the CD-functionalized CRISPR system are expressed under control of an inducible promoter. Examples of promoters that are inducible and that allow for spatiotemporal control of gene editing or gene expression may use a form of energy. The form of energy may include but is not limited to sound energy, electromagnetic radiation, chemical energy and/or thermal energy. Examples of inducible systems include tetracycline inducible promoters (Tet-On or Tet-Off), small molecule two-hybrid transcription activations systems (FKBP, ABA, etc), or light inducible systems (Phytochrome, LOV domains, or cryptochrome)., such as a Light Inducible Transcriptional Effector (LITE) that direct changes in transcriptional activity in a sequence-specific manner. The components of a light inducible system may include a fusion protein of cytidine deaminase and Cas13, a light-responsive cytochrome heterodimer (e.g. from Arabidopsis thaliana). Further examples of inducible DNA binding proteins and methods for their use are provided in U.S. 61/736,465 and U.S. 61/721,283, which is hereby incorporated by reference in its entirety.

[0767] In particular embodiments, transient or inducible expression can be achieved by using, for example, chemical-regulated promotors, i.e. whereby the application of an exogenous chemical induces gene expression. Modulating of gene expression can also be obtained by a chemical-repressible promoter, where application of the chemical represses gene expression. Chemical-inducible promoters include, but are not limited to, the maize 1n2-2 promoter, activated by benzene sulfonamide herbicide safeners (De Veylder et al., (1997) Plant Cell Physiol 38:568-77), the maize GST promoter (GST-11-27, WO93/01294), activated by hydrophobic electrophilic compounds used as pre-emergent herbicides, and the tobacco PR-1 a promoter (Ono et al., (2004) Biosci Biotechnol Biochem 68:803-7) activated by salicylic acid. Promoters which are regulated by antibiotics, such as tetracycline-inducible and tetracycline-repressible promoters (Gatz et al., (1991) Mol Gen Genet 227:229-37; U.S. Pat. Nos. 5,814,618 and 5,789,156) can also be used herein.

Translocation to and/or Expression in Specific Plant Organelles

[0768] The expression system may comprise elements for translocation to and/or expression in a specific plant organelle.

### Chloroplast Targeting

[0769] In particular embodiments, it is envisaged that the CD-functionalized CRISPR system is used to specifically modify chloroplast genes or to ensure expression in the chloroplast. For this purpose use is made of chloroplast transformation methods or compartimentalization of the CD-functionalized CRISPR components to the chloroplast. For instance, the introduction of genetic modifications in the plastid genome can reduce biosafety issues such as gene flow through pollen.

[0770] Methods of chloroplast transformation are known in the art and include Particle bombardment, PEG treatment, and microinjection. Additionally, methods involving the translocation of transformation cassettes from the nuclear genome to the pastid can be used as described in WO2010061186.

[0771] Alternatively, it is envisaged to target one or more of the CD-functionalized CRISPR components to the plant chloroplast. This is achieved by incorporating in the expression construct a sequence encoding a chloroplast transit peptide (CTP) or plastid transit peptide, operably linked to the 5′ region of the sequence encoding the fusion protein of cytidine deaminase and Cas13. The CTP is removed in a processing step during translocation into the chloroplast. Chloroplast targeting of expressed proteins is well known to the skilled artisan (see for instance Protein Transport into Chloroplasts, 2010, Annual Review of Plant Biology, Vol. 61: 157-180). In such embodiments it is also desired to target the guide RNA to the plant chloroplast. Methods and constructs which can be used for translocating guide RNA into the chloroplast by means of a chloroplast localization sequence are described, for instance, in US 20040142476, incorporated herein by reference. Such variations of constructs can be incorporated into the expression systems of the invention to efficiently translocate the CD-functionalized CRISPR system components.

### Introduction of Polynucleotides Encoding the CD-Functionalized CRISPR System in Algal Cells.

[0772] Transgenic algae (or other plants such as rape) may be particularly useful in the production of vegetable oils or biofuels such as alcohols (especially methanol and ethanol) or other products. These may be engineered to express or overexpress high levels of oil or alcohols for use in the oil or biofuel industries.

[0773] U.S. Pat. No. 8,945,839 describes a method for engineering Micro-Algae (Chlamydomonas reinhardtii cells) species) using Cas9. Using similar tools, the methods of the CD-functionalized CRISPR system described herein can be applied on Chlamydomonas species and other algae. In particular embodiments, a CRISPR-Cas protein (e.g., Cas13), cytidine deaminase (which may be fused to the CRISPR-Cas protein or an aptamer-binding adaptor protein), and guide RNA are introduced in algae expressed using a vector that expresses the fusion protein of cytidine deaminase and Cas13 under the control of a constitutive promoter such as Hsp70A-Rbc S2 or Beta2-tubulin. Guide RNA is optionally delivered using a vector containing T7 promoter. Alternatively, Cas13 mRNA and in vitro transcribed guide RNA can be delivered to algal cells. Electroporation protocols are available to the skilled person such as the standard recommended protocol from the GeneArt Chlamydomonas Engineering kit.

### Introduction of CD-Functionalized CRISPR System Components in Yeast Cells

[0774] In particular embodiments, the invention relates to the use of the CD-functionalized CRISPR system for genome editing of yeast cells. Methods for transforming yeast cells which can be used to introduce polynucleotides encoding the CD-functionalized CRISPR system components are described in Kawai et al., 2010, Bioeng Bugs. 2010 November-December; 1(6): 395-403). Non-limiting examples include transformation of yeast cells by lithium acetate treatment (which may further include carrier DNA and PEG treatment), bombardment or by electroporation.

### Transient Expression of CD-Functionalized CRISPR System Components in Plants and Plant Cell

[0775] In particular embodiments, it is envisaged that the guide RNA and/or CRISPR-Cas gene are transiently expressed in the plant cell. In these embodiments, the CD-functionalized CRISPR system can ensure modification of a target gene only when both the guide RNA, the CRISPR-Cas protein (e.g., Cas13), and cytidine deaminase (which may be fused to the CRISPR-Cas protein or an aptamer-binding adaptor protein), are present in a cell, such that genomic modification can further be controlled. As the expression of the CRISPR-Cas protein is transient, plants regenerated from such plant cells typically contain no foreign DNA. In particular embodiments the CRISPR-Cas protein is stably expressed by the plant cell and the guide sequence is transiently expressed.

[0776] In particular embodiments, the CD-functionalized CRISPR system components can be introduced in the plant cells using a plant viral vector (Scholthof et al. 1996, Annu Rev Phytopathol. 1996; 34:299-323). In further particular embodiments, said viral vector is a vector from a DNA virus. For example, geminivirus (e.g., cabbage leaf curl virus, bean yellow dwarf virus, wheat dwarf virus, tomato leaf curl virus, maize streak virus, tobacco leaf curl virus, or tomato golden mosaic virus) or nanovirus (e.g., Faba bean necrotic yellow virus). In other particular embodiments, said viral vector is a vector from an RNA virus. For example, tobravirus (e.g., tobacco rattle virus, tobacco mosaic virus), potexvirus (e.g., potato virus X), or hordeivirus (e.g., barley stripe mosaic virus). The replicating genomes of plant viruses are non-integrative vectors.

[0777] In particular embodiments, the vector used for transient expression of CD-functionalized CRISPR system is for instance a pEAQ vector, which is tailored for Agrobacterium-mediated transient expression (Sainsbury F. et al., Plant Biotechnol J. 2009 September; 7(7):682-93) in the protoplast. Precise targeting of genomic locations was demonstrated using a modified Cabbage Leaf Curl virus (CaLCuV) vector to express guide RNAs in stable transgenic plants expressing a CRISPR enzyme (Scientific Reports 5, Article number: 14926 (2015), doi:10.1038/srep14926).

[0778] In particular embodiments, double-stranded DNA fragments encoding the guide RNA and/or the CRISPR-Cas gene can be transiently introduced into the plant cell. In such embodiments, the introduced double-stranded DNA fragments are provided in sufficient quantity to modify the cell but do not persist after a contemplated period of time has passed or after one or more cell divisions. Methods for direct DNA transfer in plants are known by the skilled artisan (see for instance Davey et al. Plant Mol Biol. 1989 September; 13(3):273-85.)

[0779] In other embodiments, an RNA polynucleotide encoding the CRISPR-Cas protein (e.g., Cas13) and/or cytidine deaminase (which may be fused to the CRISPR-Cas protein or an aptamer-binding adaptor protein) is introduced into the plant cell, which is then translated and processed by the host cell generating the protein in sufficient quantity to modify the cell (in the presence of at least one guide RNA) but which does not persist after a contemplated period of time has passed or after one or more cell divisions. Methods for introducing mRNA to plant protoplasts for transient expression are known by the skilled artisan (see for instance in Gallie, Plant Cell Reports (1993), 13; 119-122).

[0780] Combinations of the different methods described above are also envisaged.

### Delivery of CD-Functionalized CRISPR System Components to the Plant Cell

[0781] In particular embodiments, it is of interest to deliver one or more components of the CD-functionalized CRISPR system directly to the plant cell. This is of interest, inter alia, for the generation of non-transgenic plants (see below). In particular embodiments, one or more of the CD-functionalized CRISPR system components is prepared outside the plant or plant cell and delivered to the cell. For instance in particular embodiments, the CRISPR-Cas protein is prepared in vitro prior to introduction to the plant cell. The CRISPR-Cas protein can be prepared by various methods known by one of skill in the art and include recombinant production. After expression, the CRISPR-Cas protein is isolated, refolded if needed, purified and optionally treated to remove any purification tags, such as a His-tag. Once crude, partially purified, or more completely purified CRISPR-Cas protein is obtained, the protein may be introduced to the plant cell.

[0782] In particular embodiments, the CRISPR-Cas protein is mixed with guide RNA targeting the gene of interest to form a pre-assembled ribonucleoprotein.

[0783] The individual components or pre-assembled ribonucleoprotein can be introduced into the plant cell via electroporation, by bombardment with CRISPR-Cas-associated gene product coated particles, by chemical transfection or by some other means of transport across a cell membrane. For instance, transfection of a plant protoplast with a pre-assembled CRISPR ribonucleoprotein has been demonstrated to ensure targeted modification of the plant genome (as described by Woo et al. Nature Biotechnology, 2015; DOI: 10.1038/nbt.3389).

[0784] In particular embodiments, the CD-functionalized CRISPR system components are introduced into the plant cells using nanoparticles. The components, either as protein or nucleic acid or in a combination thereof, can be uploaded onto or packaged in nanoparticles and applied to the plants (such as for instance described in WO 2008042156 and US 20130185823). In particular, embodiments of the invention comprise nanoparticles uploaded with or packed with DNA molecule(s) encoding the CRISPR-Cas protein (e.g., Cas13), DNA molecule(s) encoding cytidine deaminase (which may be fused to the CRISPR-Cas protein or an aptamer-binding adaptor protein), and DNA molecules encoding the guide RNA and/or isolated guide RNA as described in WO2015089419.

[0785] Further means of introducing one or more components of the CD-functionalized CRISPR system to the plant cell is by using cell penetrating peptides (CPP). Accordingly, in particular, embodiments the invention comprises compositions comprising a cell penetrating peptide linked to the CRISPR-Cas protein. In particular embodiments of the present invention, the CRISPR-Cas protein and/or guide RNA is coupled to one or more CPPs to effectively transport them inside plant protoplasts. Ramakrishna (Genome Res. 2014 June; 24(6):1020-7 for Cas9 in human cells). In other embodiments, the CRISPR-Cas gene and/or guide RNA are encoded by one or more circular or non-circular DNA molecule(s) which are coupled to one or more CPPs for plant protoplast delivery. The plant protoplasts are then regenerated to plant cells and further to plants. CPPs are generally described as short peptides of fewer than 35 amino acids either derived from proteins or from chimeric sequences which are capable of transporting biomolecules across cell membrane in a receptor independent manner. CPP can be cationic peptides, peptides having hydrophobic sequences, amphipatic peptides, peptides having proline-rich and anti-microbial sequence, and chimeric or bipartite peptides (Pooga and Langel 2005). CPPs are able to penetrate biological membranes and as such trigger the movement of various biomolecules across cell membranes into the cytoplasm and to improve their intracellular routing, and hence facilitate interaction of the biolomolecule with the target. Examples of CPP include amongst others: Tat, a nuclear transcriptional activator protein required for viral replication by HIV type1, penetratin, Kaposi fibroblast growth factor (FGF) signal peptide sequence, integrin β3 signal peptide sequence; polyarginine peptide Args sequence, Guanine rich-molecular transporters, sweet arrow peptide, etc.

### Use of the CD-Functionalized CRISPR System to Make Genetically Modified Non-Transgenic Plants

[0786] In particular embodiments, the methods described herein are used to modify endogenous genes or to modify their expression without the permanent introduction into the genome of the plant of any foreign gene, including those encoding CRISPR components, so as to avoid the presence of foreign DNA in the genome of the plant. This can be of interest as the regulatory requirements for non-transgenic plants are less rigorous.

[0787] In particular embodiments, this is ensured by transient expression of the CD-functionalized CRISPR system components. In particular embodiments one or more of the components are expressed on one or more viral vectors which produce sufficient CRISPR-Cas protein, cytidine deaminase, and guide RNA to consistently steadily ensure modification of a gene of interest according to a method described herein.

[0788] In particular embodiments, transient expression of CD-functionalized CRISPR system constructs is ensured in plant protoplasts and thus not integrated into the genome. The limited window of expression can be sufficient to allow the CD-functionalized CRISPR system to ensure modification of a target gene as described herein.

[0789] In particular embodiments, the different components of the CD-functionalized CRISPR system are introduced in the plant cell, protoplast or plant tissue either separately or in mixture, with the aid of particulate delivering molecules such as nanoparticles or CPP molecules as described herein above.

[0790] The expression of the CD-functionalized CRISPR system components can induce targeted modification of the genome, by deaminase activity of the cytidine deaminase. The different strategies described herein above allow CRISPR-mediated targeted genome editing without requiring the introduction of the CD-functionalized CRISPR system components into the plant genome. Components which are transiently introduced into the plant cell are typically removed upon crossing.

### Plant Cultures and Regeneration

[0791] In particular embodiments, plant cells which have a modified genome and that are produced or obtained by any of the methods described herein, can be cultured to regenerate a whole plant which possesses the transformed or modified genotype and thus the desired phenotype. Conventional regeneration techniques are well known to those skilled in the art. Particular examples of such regeneration techniques rely on manipulation of certain phytohormones in a tissue culture growth medium, and typically relying on a biocide and/or herbicide marker which has been introduced together with the desired nucleotide sequences. In further particular embodiments, plant regeneration is obtained from cultured protoplasts, plant callus, explants, organs, pollens, embryos or parts thereof (see e.g. Evans et al. (1983), Handbook of Plant Cell Culture, Klee et al (1987) Ann. Rev. of Plant Phys.).

[0792] In particular embodiments, transformed or improved plants as described herein can be self-pollinated to provide seed for homozygous improved plants of the invention (homozygous for the DNA modification) or crossed with non-transgenic plants or different improved plants to provide seed for heterozygous plants. Where a recombinant DNA was introduced into the plant cell, the resulting plant of such a crossing is a plant which is heterozygous for the recombinant DNA molecule. Both such homozygous and heterozygous plants obtained by crossing from the improved plants and comprising the genetic modification (which can be a recombinant DNA) are referred to herein as “progeny”. Progeny plants are plants descended from the original transgenic plant and containing the genome modification or recombinant DNA molecule introduced by the methods provided herein. Alternatively, genetically modified plants can be obtained by one of the methods described supra using the CD-functionalized CRISPR system whereby no foreign DNA is incorporated into the genome. Progeny of such plants, obtained by further breeding may also contain the genetic modification. Breedings are performed by any breeding methods that are commonly used for different crops (e.g., Allard, Principles of Plant Breeding, John Wiley & Sons, NY, U. of CA, Davis, Calif., 50-98 (1960).

Generation of Plants with Enhanced Agronomic Traits

[0793] The CD-functionalized CRISPR systems provided herein can be used to introduce targeted A-G and T(U)-C mutations. By co-expression of multiple targeting RNAs directed to achieve multiple modifications in a single cell, multiplexed genome modification can be ensured. This technology can be used to high-precision engineering of plants with improved characteristics, including enhanced nutritional quality, increased resistance to diseases and resistance to biotic and abiotic stress, and increased production of commercially valuable plant products or heterologous compounds.

[0794] In particular embodiments, the CD-functionalized CRISPR system as described herein is used to introduce targeted A-G and T(U)-C mutations. Such mutation can be a nonsense mutation (e.g., premature stop codon) or a missense mutation (e.g., encoding different amino acid residue). This is of interest where the A-G and T(U)-C mutations in certain endogenous genes can confer or contribute to a desired trait.

[0795] The methods described herein generally result in the generation of “improved plants” in that they have one or more desirable traits compared to the wildtype plant. In particular embodiments, the plants, plant cells or plant parts obtained are transgenic plants, comprising an exogenous DNA sequence incorporated into the genome of all or part of the cells of the plant. In particular embodiments, non-transgenic genetically modified plants, plant parts or cells are obtained, in that no exogenous DNA sequence is incorporated into the genome of any of the plant cells of the plant. In such embodiments, the improved plants are non-transgenic. Where only the modification of an endogenous gene is ensured and no foreign genes are introduced or maintained in the plant genome, the resulting genetically modified crops contain no foreign genes and can thus basically be considered non-transgenic.

[0796] In particular embodiments, the polynucleotides are delivered into the cell by a DNA virus (e.g., a geminivirus) or an RNA virus (e.g., a tobravirus). In particular embodiments, the introducing steps include delivering to the plant cell a T-DNA containing one or more polynucleotide sequences encoding the CRISPR-Cas protein, the cytidine deaminase, and the guide RNA, where the delivering is via Agrobacterium. The polynucleotide sequence encoding the components of the CD-functionalized CRISPR system can be operably linked to a promoter, such as a constitutive promoter (e.g., a cauliflower mosaic virus 35S promoter), or a cell specific or inducible promoter. In particular embodiments, the polynucleotide is introduced by microprojectile bombardment. In particular embodiments, the method further includes screening the plant cell after the introducing steps to determine whether the expression of the gene of interest has been modified. In particular embodiments, the methods include the step of regenerating a plant from the plant cell. In further embodiments, the methods include cross breeding the plant to obtain a genetically desired plant lineage.

[0797] In particular embodiments of the methods described above, disease resistant crops are obtained by targeted mutation of disease susceptibility genes or genes encoding negative regulators (e.g. Mlo gene) of plant defense genes. In a particular embodiment, herbicide-tolerant crops are generated by targeted substitution of specific nucleotides in plant genes such as those encoding acetolactate synthase (ALS) and protoporphyrinogen oxidase (PPO). In particular embodiments drought and salt tolerant crops by targeted mutation of genes encoding negative regulators of abiotic stress tolerance, low amylose grains by targeted mutation of Waxy gene, rice or other grains with reduced rancidity by targeted mutation of major lipase genes in aleurone layer, etc. In particular embodiments. A more extensive list of endogenous genes encoding a traits of interest are listed below.

### Use of CD-Functionalized CRISPR System to Modify Polyploid Plants

[0798] Many plants are polyploid, which means they carry duplicate copies of their genomes—sometimes as many as six, as in wheat. The methods according to the present invention, which make use of the CD-functionalized CRISPR system can be “multiplexed” to affect all copies of a gene, or to target dozens of genes at once. For instance, in particular embodiments, the methods of the present invention are used to simultaneously ensure a loss of function mutation in different genes responsible for suppressing defences against a disease. In particular embodiments, the methods of the present invention are used to simultaneously suppress the expression of the TaMLO-A1, TaMLO-B1 and TaMLO-D1 nucleic acid sequence in a wheat plant cell and regenerating a wheat plant therefrom, in order to ensure that the wheat plant is resistant to powdery mildew (see also WO2015109752).

### Examplary Genes Conferring Agronomic Traits

[0799] In particular embodiments, the invention encompasses methods which involve targeted A-G and T(U)-C mutations in endogenous genes and their regulatory elements, such as listed below:

[0800] 1. Genes that Confer Resistance to Pests or Diseases:

[0801] Plant disease resistance genes. A plant can be transformed with cloned resistance genes to engineer plants that are resistant to specific pathogen strains. See, e.g., Jones et al., Science 266:789 (1994) (cloning of the tomato Cf-9 gene for resistance to Cladosporium fulvum); Martin et al., Science 262:1432 (1993) (tomato Pto gene for resistance to Pseudomonas syringae pv. tomato encodes a protein kinase); Mindrinos et al., Cell 78:1089 (1994) (Arabidopsis may be RSP2 gene for resistance to Pseudomonas syringae). A plant gene that is upregulated or down regulated during pathogen infection can be engineered for pathogen resistance. See, e.g., Thomazella et al., bioRxiv 064824; doi: https://doi.org/10.1101/064824 Epub. Jul. 23, 2016 (tomato plants with deletions in the S1DMR6-1 which is normally upregulated during pathogen infection).

[0802] Genes conferring resistance to a pest, such as soybean cyst nematode. See e.g., PCT Application WO 96/30517; PCT Application WO 93/19181.

[0803] Bacillus thuringiensis proteins see, e.g., Geiser et al., Gene 48:109 (1986).

[0804] Lectins, see, for example, Van Damme et al., Plant Molec. Biol. 24:25 (1994.

[0805] Vitamin-binding protein, such as avidin, see PCT application US93/06487, teaching the use of avidin and avidin homologues as larvicides against insect pests.

[0806] Enzyme inhibitors such as protease or proteinase inhibitors or amylase inhibitors. See, e.g., Abe et al., J. Biol. Chem. 262:16793 (1987), Huub et al., Plant Molec. Biol. 21:985 (1993)), Sumitani et al., Biosci. Biotech. Biochem. 57:1243 (1993) and U.S. Pat. No. 5,494,813.

[0807] Insect-specific hormones or pheromones such as ecdysteroid or juvenile hormone, a variant thereof, a mimetic based thereon, or an antagonist or agonist thereof. See, for example Hammock et al., Nature 344:458 (1990).

[0808] Insect-specific peptides or neuropeptides which, upon expression, disrupts the physiology of the affected pest. For example Regan, J. Biol. Chem. 269:9 (1994) and Pratt et al., Biochem. Biophys. Res. Comm. 163:1243 (1989). See also U.S. Pat. No. 5,266,317.

[0809] Insect-specific venom produced in nature by a snake, a wasp, or any other organism. For example, see Pang et al., Gene 116: 165 (1992).

[0810] Enzymes responsible for a hyperaccumulation of a monoterpene, a sesquiterpene, a steroid, hydroxamic acid, a phenylpropanoid derivative or another nonprotein molecule with insecticidal activity.

[0811] Enzymes involved in the modification, including the post-translational modification, of a biologically active molecule; for example, a glycolytic enzyme, a proteolytic enzyme, a lipolytic enzyme, a nuclease, a cyclase, a transaminase, an esterase, a hydrolase, a phosphatase, a kinase, a phosphorylase, a polymerase, an elastase, a chitinase and a glucanase, whether natural or synthetic. See PCT application WO93/02197, Kramer et al., Insect Biochem. Molec. Biol. 23:691 (1993) and Kawalleck et al., Plant Molec. Biol. 21:673 (1993).

[0812] Molecules that stimulates signal transduction. For example, see Botella et al., Plant Molec. Biol. 24:757 (1994), and Griess et al., Plant Physiol. 104:1467 (1994).

[0813] Viral-invasive proteins or a complex toxin derived therefrom. See Beachy et al., Ann. rev. Phytopathol. 28:451 (1990).

[0814] Developmental-arrestive proteins produced in nature by a pathogen or a parasite. See Lamb et al., Bio/Technology 10:1436 (1992) and Toubart et al., Plant J. 2:367 (1992).

[0815] A developmental-arrestive protein produced in nature by a plant. For example, Logemann et al., Bio/Technology 10:305 (1992).

[0816] In plants, pathogens are often host-specific. For example, some Fusarium species will causes tomato wilt but attacks only tomato, and other Fusarium species attack only wheat. Plants have existing and induced defenses to resist most pathogens. Mutations and recombination events across plant generations lead to genetic variability that gives rise to susceptibility, especially as pathogens reproduce with more frequency than plants. In plants there can be non-host resistance, e.g., the host and pathogen are incompatible or there can be partial resistance against all races of a pathogen, typically controlled by many genes and/or also complete resistance to some races of a pathogen but not to other races. Such resistance is typically controlled by a few genes. Using methods and components of the CD-functionalized CRISPR system, a new tool now exists to induce specific mutations in anticipation hereon. Accordingly, one can analyze the genome of sources of resistance genes, and in plants having desired characteristics or traits, use the method and components of the CD-functionalized CRISPR system to induce the rise of resistance genes. The present systems can do so with more precision than previous mutagenic agents and hence accelerate and improve plant breeding programs.

[0817] 2. Genes Involved in Plant Diseases, Such as Those Listed in WO 2013046247:

[0818] Rice diseases: Magnaporthe grisea, Cochliobolus miyabeanus, Rhizoctonia solani, Gibberella fujikuroi; Wheat diseases: Erysiphe graminis, Fusarium graminearum, F. avenaceum, F. culmorum, Microdochium nivale, Puccinia striiformis, P. graminis, P. recondita, Micronectriella nivale, Typhula sp., Ustilago tritici, Tilletia caries, Pseudocercosporella herpotrichoides, Mycosphaerella graminicola, Stagonospora nodorum, Pyrenophora tritici-repentis; Barley diseases: Erysiphe graminis, Fusarium graminearum, F. avenaceum, F. culmorum, Microdochium nivale, Puccinia striiformis, P. graminis, P. hordei, Ustilago nuda, Rhynchosporium secalis, Pyrenophora teres, Cochliobolus sativus, Pyrenophora graminea, Rhizoctonia solani; Maize diseases: Ustilago maydis, Cochliobolus heterostrophus, Gloeocercospora sorghi, Puccinia polysora, Cercospora zeae-maydis, Rhizoctonia solani;

[0819] Citrus diseases: Diaporthe citri, Elsinoe fawcetti, Penicillium digitatum, P. italicum, Phytophthora parasitica, Phytophthora citrophthora; Apple diseases: Monilinia mali, Valsa ceratosperma, Podosphaera leucotricha, Alternaria alternata apple pathotype, Venturia inaequalis, Colletotrichum acutatum, Phytophtora cactorum;

[0820] Pear diseases: Venturia nashicola, V. pirina, Alternaria alternata Japanese pear pathotype, Gymnosporangium haraeanum, Phytophtora cactorum;

[0821] Peach diseases: Monilinia fructicola, Cladosporium carpophilum, Phomopsis sp.;

[0822] Grape diseases: Elsinoe ampelina, Glomerella cingulata, Uninula necator, Phakopsora ampelopsidis, Guignardia bidwellii, Plasmopara viticola;

[0823] Persimmon diseases: Gloesporium kaki, Cercospora kaki, Mycosphaerela nawae;

[0824] Gourd diseases: Colletotrichum lagenarium, Sphaerotheca fuliginea, Mycosphaerella melonis, Fusarium oxysporum, Pseudoperonospora cubensis, Phytophthora sp., Pythium sp.;

[0825] Tomato diseases: Alternaria solani, Cladosporium fulvum, Phytophthora infestans; Pseudomonas syringae pv. Tomato; Phytophthora capsici; Xanthomonas

[0826] Eggplant diseases: Phomopsis vexans, Erysiphe cichoracearum; Brassicaceous vegetable diseases: Alternaria japonica, Cercosporella brassicae, Plasmodiophora brassicae, Peronospora parasitica;

[0827] Welsh onion diseases: Puccinia allii, Peronospora destructor;

[0828] Soybean diseases: Cercospora kikuchii, Elsinoe glycines, Diaporthe phaseolorum var. sojae, Septoria glycines, Cercospora sojina, Phakopsora pachyrhizi, Phytophthora sojae, Rhizoctonia solani, Corynespora casiicola, Sclerotinia sclerotiorum;

[0829] Kidney bean diseases: Colletrichum lindemthianum;

[0830] Peanut diseases: Cercospora personata, Cercospora arachidicola, Sclerotium rolfsii;

[0831] Pea diseases pea: Erysiphe pisi;

[0832] Potato diseases: Alternaria solani, Phytophthora infestans, Phytophthora erythroseptica, Spongospora subterranean, f sp. Subterranean;

[0833] Strawberry diseases: Sphaerotheca humuli, Glomerella cingulata;

[0834] Tea diseases: Exobasidium reticulatum, Elsinoe leucospila, Pestalotiopsis sp., Colletotrichum theae-sinensis;

[0835] Tobacco diseases: Alternaria longipes, Erysiphe cichoracearum, Colletotrichum tabacum, Peronospora tabacina, Phytophthora nicotianae;

[0836] Rapeseed diseases: Sclerotinia sclerotiorum, Rhizoctonia solani;

[0837] Cotton diseases: Rhizoctonia solani;

[0838] Beet diseases: Cercospora beticola, Thanatephorus cucumeris, Thanatephorus cucumeris, Aphanomyces cochlioides;

[0839] Rose diseases: Diplocarpon rosae, Sphaerotheca pannosa, Peronospora sparsa;

[0840] Diseases of chrysanthemum and asteraceae: Bremia lactuca, Septoria chrysanthemi-indici, Puccinia horiana;

[0841] Diseases of various plants: Pythium aphanidermatum, Pythium debarianum, Pythium graminicola, Pythium irregulare, Pythium ultimum, Botrytis cinerea, Sclerotinia sclerotiorum;

[0842] Radish diseases: Alternaria brassicicola;

[0843] Zoysia diseases: Sclerotinia homeocarpa, Rhizoctonia solani;

[0844] Banana diseases: Mycosphaerella fijiensis, Mycosphaerella musicola;

[0845] Sunflower diseases: Plasmopara halstedii;

[0846] Seed diseases or diseases in the initial stage of growth of various plants caused by Aspergillus spp., Penicillium spp., Fusarium spp., Gibberella spp., Tricoderma spp., Thielaviopsis spp., Rhizopus spp., Mucor spp., Corticium spp., Rhoma spp., Rhizoctonia spp., Diplodia spp., or the like;

[0847] Virus diseases of various plants mediated by Polymixa spp., Olpidium spp., or the like.

[0848] 3. Examples of Genes that Confer Resistance to Herbicides:

[0849] Resistance to herbicides that inhibit the growing point or meristem, such as an imidazolinone or a sulfonylurea, for example, by Lee et al., EMBO J. 7:1241 (1988), and Miki et al., Theor. Appl. Genet. 80:449 (1990), respectively.

[0850] Glyphosate tolerance (resistance conferred by, e.g., mutant 5-enolpyruvylshikimate-3-phosphate synthase (EPSPs) genes, aroA genes and glyphosate acetyl transferase (GAT) genes, respectively), or resistance to other phosphono compounds such as by glufosinate (phosphinothricin acetyl transferase (PAT) genes from Streptomyces species, including Streptomyces hygroscopicus and Streptomyces viridichromogenes), and to pyridinoxy or phenoxy proprionic acids and cyclohexones by ACCase inhibitor-encoding genes. See, for example, U.S. Pat. Nos. 4,940,835 and 6,248,876, 4,769,061, EP No. 0 333 033 and U.S. Pat. No. 4,975,374. See also EP No. 0242246, DeGreef et al., Bio/Technology 7:61 (1989), Marshall et al., Theor. Appl. Genet. 83:435 (1992), WO 2005012515 to Castle et. al. and WO 2005107437.

[0851] Resistance to herbicides that inhibit photosynthesis, such as a triazine (psbA and gs+ genes) or a benzonitrile (nitrilase gene), and glutathione S-transferase in Przibila et al., Plant Cell 3:169 (1991), U.S. Pat. No. 4,810,648, and Hayes et al., Biochem. J. 285: 173 (1992).

[0852] Genes encoding Enzymes detoxifying the herbicide or a mutant glutamine synthase enzyme that is resistant to inhibition, e.g. n U.S. patent application Ser. No. 11/760,602. Or a detoxifying enzyme is an enzyme encoding a phosphinothricin acetyltransferase (such as the bar or pat protein from Streptomyces species). Phosphinothricin acetyltransferases are for example described in U.S. Pat. Nos. 5,561,236; 5,648,477; 5,646,024; 5,273,894; 5,637,489; 5,276,268; 5,739,082; 5,908,810 and 7,112,665.

[0853] Hydroxyphenylpyruvatedioxygenases (HPPD) inhibitors, naturally occurring HPPD resistant enzymes, or genes encoding a mutated or chimeric HPPD enzyme as described in WO 96/38567, WO 99/24585, and WO 99/24586, WO 2009/144079, WO 2002/046387, or U.S. Pat. No. 6,768,044.

[0854] 4. Examples of Genes Involved in Abiotic Stress Tolerance:

[0855] Transgene capable of reducing the expression and/or the activity of poly(ADP-ribose) polymerase (PARP) gene in the plant cells or plants as described in WO 00/04173 or, WO/2006/045633.

[0856] Transgenes capable of reducing the expression and/or the activity of the PARG encoding genes of the plants or plants cells, as described e.g. in WO 2004/090140.

[0857] Transgenes coding for a plant-functional enzyme of the nicotineamide adenine dinucleotide salvage synthesis pathway including nicotinamidase, nicotinate phosphoribosyltransferase, nicotinic acid mononucleotide adenyl transferase, nicotinamide adenine dinucleotide synthetase or nicotine amide phosphorybosyltransferase as described e.g. in EP 04077624.7, WO 2006/133827, PCT/EP07/002,433, EP 1999263, or WO 2007/107326.

[0858] Enzymes involved in carbohydrate biosynthesis include those described in e.g. EP 0571427, WO 95/04826, EP 0719338, WO 96/15248, WO 96/19581, WO 96/27674, WO 97/11188, WO 97/26362, WO 97/32985, WO 97/42328, WO 97/44472, WO 97/45545, WO 98/27212, WO 98/40503, WO99/58688, WO 99/58690, WO 99/58654, WO 00/08184, WO 00/08185, WO 00/08175, WO 00/28052, WO 00/77229, WO 01/12782, WO 01/12826, WO 02/101059, WO 03/071860, WO 2004/056999, WO 2005/030942, WO 2005/030941, WO 2005/095632, WO 2005/095617, WO 2005/095619, WO 2005/095618, WO 2005/123927, WO 2006/018319, WO 2006/103107, WO 2006/108702, WO 2007/009823, WO 00/22140, WO 2006/063862, WO 2006/072603, WO 02/034923, EP 06090134.5, EP 06090228.5, EP 06090227.7, EP 07090007.1, EP 07090009.7, WO 01/14569, WO 02/79410, WO 03/33540, WO 2004/078983, WO 01/19975, WO 95/26407, WO 96/34968, WO 98/20145, WO 99/12950, WO 99/66050, WO 99/53072, U.S. Pat. No. 6,734,341, WO 00/11192, WO 98/22604, WO 98/32326, WO 01/98509, WO 01/98509, WO 2005/002359, U.S. Pat. Nos. 5,824,790, 6,013,861, WO 94/04693, WO 94/09144, WO 94/11520, WO 95/35026 or WO 97/20936 or enzymes involved in the production of polyfructose, especially of the inulin and levan-type, as disclosed in EP 0663956, WO 96/01904, WO 96/21023, WO 98/39460, and WO 99/24593, the production of alpha-1,4-glucans as disclosed in WO 95/31553, US 2002031826, U.S. Pat. Nos. 6,284,479, 5,712,107, WO 97/47806, WO 97/47807, WO 97/47808 and WO 00/14249, the production of alpha-1,6 branched alpha-1,4-glucans, as disclosed in WO 00/73422, the production of alternan, as disclosed in e.g. WO 00/47727, WO 00/73422, EP 06077301.7, U.S. Pat. No. 5,908,975 and EP 0728213, the production of hyaluronan, as for example disclosed in WO 2006/032538, WO 2007/039314, WO 2007/039315, WO 2007/039316, JP 2006304779, and WO 2005/012529.

[0859] Genes that improve drought resistance. For example, WO 2013122472 discloses that the absence or reduced level of functional Ubiquitin Protein Ligase protein (UPL) protein, more specifically, UPL3, leads to a decreased need for water or improved resistance to drought of said plant. Other examples of transgenic plants with increased drought tolerance are disclosed in, for example, US 2009/0144850, US 2007/0266453, and WO 2002/083911. US2009/0144850 describes a plant displaying a drought tolerance phenotype due to altered expression of a DRO2 nucleic acid. US 2007/0266453 describes a plant displaying a drought tolerance phenotype due to altered expression of a DRO3 nucleic acid and WO 2002/08391 1 describes a plant having an increased tolerance to drought stress due to a reduced activity of an ABC transporter which is expressed in guard cells. Another example is the work by Kasuga and co-authors (1999), who describe that overexpression of cDNA encoding DREB1 A in transgenic plants activated the expression of many stress tolerance genes under normal growing conditions and resulted in improved tolerance to drought, salt loading, and freezing. However, the expression of DREB1A also resulted in severe growth retardation under normal growing conditions (Kasuga (1999) Nat Biotechnol 17(3) 287-291).

[0860] In further particular embodiments, crop plants can be improved by influencing specific plant traits. For example, by developing pesticide-resistant plants, improving disease resistance in plants, improving plant insect and nematode resistance, improving plant resistance against parasitic weeds, improving plant drought tolerance, improving plant nutritional value, improving plant stress tolerance, avoiding self-pollination, plant forage digestibility biomass, grain yield etc. A few specific non-limiting examples are provided hereinbelow.

[0861] In addition to targeted mutation of single genes, CD-functionalized CRISPR system can be designed to allow targeted mutation of multiple genes, deletion of chromosomal fragment, site-specific integration of transgene, site-directed mutagenesis in vivo, and precise gene replacement or allele swapping in plants. Therefore, the methods described herein have broad applications in gene discovery and validation, mutational and cisgenic breeding, and hybrid breeding. These applications facilitate the production of a new generation of genetically modified crops with various improved agronomic traits such as herbicide resistance, disease resistance, abiotic stress tolerance, high yield, and superior quality.

### Use of CD-Functionalized CRISPR System to Create Male Sterile Plants

[0862] Hybrid plants typically have advantageous agronomic traits compared to inbred plants. However, for self-pollinating plants, the generation of hybrids can be challenging. In different plant types, genes have been identified which are important for plant fertility, more particularly male fertility. For instance, in maize, at least two genes have been identified which are important in fertility (Amitabh Mohanty International Conference on New Plant Breeding Molecular Technologies Technology Development And Regulation, Oct. 9-10, 2014, Jaipur, India; Svitashev et al. Plant Physiol. 2015 October; 169(2):931-45; Djukanovic et al. Plant J. 2013 December; 76(5):888-99). The methods and systems provided herein can be used to target genes required for male fertility so as to generate male sterile plants which can easily be crossed to generate hybrids. In particular embodiments, the CD-functionalized CRISPR system provided herein is used for targeted mutagenesis of the cytochrome P450-like gene (MS26) or the meganuclease gene (MS45) thereby conferring male sterility to the maize plant. Maize plants which are as such genetically altered can be used in hybrid breeding programs.

### Increasing the Fertility Stage in Plants

[0863] In particular embodiments, the methods and systems provided herein are used to prolong the fertility stage of a plant such as of a rice plant. For instance, a rice fertility stage gene such as Ehd3 can be targeted in order to generate a mutation in the gene and plantlets can be selected for a prolonged regeneration plant fertility stage (as described in CN 104004782)

### Use of CD-Functionalized CRISPR System to Generate Genetic Variation in a Crop of Interest

[0864] The availability of wild germplasm and genetic variations in crop plants is the key to crop improvement programs, but the available diversity in germplasms from crop plants is limited. The present invention envisages methods for generating a diversity of genetic variations in a germplasm of interest. In this application of the CD-functionalized CRISPR system a library of guide RNAs targeting different locations in the plant genome is provided and is introduced into plant cells together with the CRISPR-Cas protein and cytidine deaminase. In this way a collection of genome-scale point mutations and gene knock-outs can be generated. In particular embodiments, the methods comprise generating a plant part or plant from the cells so obtained and screening the cells for a trait of interest. The target genes can include both coding and non-coding regions. In particular embodiments, the trait is stress tolerance and the method is a method for the generation of stress-tolerant crop varieties

### Use of CD-Functionalized CRISPR to Affect Fruit-Ripening

[0865] Ripening is a normal phase in the maturation process of fruits and vegetables. Only a few days after it starts it renders a fruit or vegetable inedible. This process brings significant losses to both farmers and consumers. In particular embodiments, the methods of the present invention are used to reduce ethylene production. This is ensured by ensuring one or more of the following: a. Suppression of ACC synthase gene expression. ACC (1-aminocyclopropane-1-carboxylic acid) synthase is the enzyme responsible for the conversion of S-adenosylmethionine (SAM) to ACC; the second to the last step in ethylene biosynthesis. Enzyme expression is hindered when an antisense (“mirror-image”) or truncated copy of the synthase gene is inserted into the plant's genome; b. Insertion of the ACC deaminase gene. The gene coding for the enzyme is obtained from Pseudomonas chlororaphis, a common nonpathogenic soil bacterium. It converts ACC to a different compound thereby reducing the amount of ACC available for ethylene production; c. Insertion of the SAM hydrolase gene. This approach is similar to ACC deaminase wherein ethylene production is hindered when the amount of its precursor metabolite is reduced; in this case SAM is converted to homoserine. The gene coding for the enzyme is obtained from E. coli T3 bacteriophage and d. Suppression of ACC oxidase gene expression. ACC oxidase is the enzyme which catalyzes the oxidation of ACC to ethylene, the last step in the ethylene biosynthetic pathway. Using the methods described herein, down regulation of the ACC oxidase gene results in the suppression of ethylene production, thereby delaying fruit ripening. In particular embodiments, additionally or alternatively to the modifications described above, the methods described herein are used to modify ethylene receptors, so as to interfere with ethylene signals obtained by the fruit. In particular embodiments, expression of the ETR1 gene, encoding an ethylene binding protein is modified, more particularly suppressed. In particular embodiments, additionally or alternatively to the modifications described above, the methods described herein are used to modify expression of the gene encoding Polygalacturonase (PG), which is the enzyme responsible for the breakdown of pectin, the substance that maintains the integrity of plant cell walls. Pectin breakdown occurs at the start of the ripening process resulting in the softening of the fruit. Accordingly, in particular embodiments, the methods described herein are used to introduce a mutation in the PG gene or to suppress activation of the PG gene in order to reduce the amount of PG enzyme produced thereby delaying pectin degradation.

[0866] Thus in particular embodiments, the methods comprise the use of the CD-functionalized CRISPR system to ensure one or more modifications of the genome of a plant cell such as described above, and regenerating a plant therefrom. In particular embodiments, the plant is a tomato plant.

### Increasing Storage Life of Plants

[0867] In particular embodiments, the methods of the present invention are used to modify genes involved in the production of compounds which affect storage life of the plant or plant part. More particularly, the modification is in a gene that prevents the accumulation of reducing sugars in potato tubers. Upon high-temperature processing, these reducing sugars react with free amino acids, resulting in brown, bitter-tasting products and elevated levels of acrylamide, which is a potential carcinogen. In particular embodiments, the methods provided herein are used to reduce or inhibit expression of the vacuolar invertase gene (VInv), which encodes a protein that breaks down sucrose to glucose and fructose (Clasen et al. DOI: 10.1111/pbi.12370).

### The Use of the CD-Functionalized CRISPR System to Ensure a Value Added Trait

[0868] In particular embodiments the CD-functionalized CRISPR system is used to produce nutritionally improved agricultural crops. In particular embodiments, the methods provided herein are adapted to generate “functional foods”, i.e. a modified food or food ingredient that may provide a health benefit beyond the traditional nutrients it contains and or “nutraceutical”, i.e. substances that may be considered a food or part of a food and provides health benefits, including the prevention and treatment of disease. In particular embodiments, the nutraceutical is useful in the prevention and/or treatment of one or more of cancer, diabetes, cardiovascular disease, and hypertension.

[0869] Examples of nutritionally improved crops include (Newell-McGloughlin, Plant Physiology, July 2008, Vol. 147, pp. 939-953):

[0870] Modified protein quality, content and/or amino acid composition, such as have been described for Bahiagrass (Luciani et al. 2005, Florida Genetics Conference Poster), Canola (Roesler et al., 1997, Plant Physiol 113 75-81), Maize (Cromwell et al, 1967, 1969 J Anim Sci 26 1325-1331, O'Quin et al. 2000 J Anim Sci 78 2144-2149, Yang et al. 2002, Transgenic Res 11 11-20, Young et al. 2004, Plant J 38 910-922), Potato (Yu J and Ao, 1997 Acta Bot Sin 39 329-334; Chakraborty et al. 2000, Proc Natl Acad Sci USA 97 3724-3729; Li et al. 2001) Chin Sci Bull 46 482-484, Rice (Katsube et al. 1999, Plant Physiol 120 1063-1074), Soybean (Dinkins et al. 2001, Rapp 2002, In Vitro Cell Dev Biol Plant 37 742-747), Sweet Potato (Egnin and Prakash 1997, In Vitro Cell Dev Biol 33 52A).

[0871] Essential amino acid content, such as has been described for Canola (Falco et al. 1995, Bio/Technology 13 577-582), Lupin (White et al. 2001, J Sci Food Agric 81 147-154), Maize (Lai and Messing, 2002, Agbios 2008 GM crop database (Mar. 11, 2008)), Potato (Zeh et al. 2001, Plant Physiol 127 792-802), Sorghum (Zhao et al. 2003, Kluwer Academic Publishers, Dordrecht, The Netherlands, pp 413-416), Soybean (Falco et al. 1995 Bio/Technology 13 577-582; Galili et al. 2002 Crit Rev Plant Sci 21 167-204).

[0872] Oils and Fatty acids such as for Canola (Dehesh et al. (1996) Plant J 9 167-172 [PubMed]; Del Vecchio (1996) INFORM International News on Fats, Oils and Related Materials 7 230-243; Roesler et al. (1997) Plant Physiol 113 75-81 [PMC free article] [PubMed]; Froman and Ursin (2002, 2003) Abstracts of Papers of the American Chemical Society 223 U35; James et al. (2003) Am J Clin Nutr 77 1140-1145 [PubMed]; Agbios (2008, above); coton (Chapman et al. (2001). J Am Oil Chem Soc 78 941-947; Liu et al. (2002) J Am Coll Nutr 21 205S-211S [PubMed]; O'Neill (2007) Australian Life Scientist. http://www.biotechnews.com.au/index.php/id;866694817;fp;4;fpid;2 (Jun. 17, 2008), Linseed (Abbadi et al., 2004, Plant Cell 16: 2734-2748), Maize (Young et al., 2004, Plant J 38 910-922), oil palm (Jalani et al. 1997, J Am Oil Chem Soc 74 1451-1455; Parveez, 2003, AgBiotechNet 113 1-8), Rice (Anai et al., 2003, Plant Cell Rep 21 988-992), Soybean (Reddy and Thomas, 1996, Nat Biotechnol 14 639-642; Kinney and Kwolton, 1998, Blackie Academic and Professional, London, pp 193-213), Sunflower (Arcadia, Biosciences 2008)

[0873] Carbohydrates, such as Fructans described for Chicory (Smeekens (1997) Trends Plant Sci 2 286-287, Sprenger et al. (1997) FEBS Lett 400 355-358, Sévenier et al. (1998) Nat Biotechnol 16 843-846), Maize (Caimi et al. (1996) Plant Physiol 110 355-363), Potato (Hellwege et al., 1997 Plant J 12 1057-1065), Sugar Beet (Smeekens et al. 1997, above), Inulin, such as described for Potato (Hellewege et al. 2000, Proc Natl Acad Sci USA 97 8699-8704), Starch, such as described for Rice (Schwall et al. (2000) Nat Biotechnol 18 551-554, Chiang et al. (2005) Mol Breed 15 125-143),

[0874] Vitamins and carotenoids, such as described for Canola (Shintani and DellaPenna (1998) Science 282 2098-2100), Maize (Rocheford et al. (2002). J Am Coll Nutr 21 191S-198S, Cahoon et al. (2003) Nat Biotechnol 21 1082-1087, Chen et al. (2003) Proc Natl Acad Sci USA 100 3525-3530), Mustardseed (Shewmaker et al. (1999) Plant J 20 401-412, Potato (Ducreux et al., 2005, J Exp Bot 56 81-89), Rice (Ye et al. (2000) Science 287 303-305, Strawberry (Agius et al. (2003), Nat Biotechnol 21 177-181), Tomato (Rosati et al. (2000) Plant J 24 413-419, Fraser et al. (2001) J Sci Food Agric 81 822-827, Mehta et al. (2002) Nat Biotechnol 20 613-618, Diaz de la Garza et al. (2004) Proc Natl Acad Sci USA 101 13720-13725, Enfissi et al. (2005) Plant Biotechnol J 3 17-27, DellaPenna (2007) Proc Natl Acad Sci USA 104 3675-3676.

[0875] Functional secondary metabolites, such as described for Apple (stilbenes, Szankowski et al. (2003) Plant Cell Rep 22: 141-149), Alfalfa (resveratrol, Hipskind and Paiva (2000) Mol Plant Microbe Interact 13 551-562), Kiwi (resveratrol, Kobayashi et al. (2000) Plant Cell Rep 19 904-910), Maize and Soybean (flavonoids, Yu et al. (2000) Plant Physiol 124 781-794), Potato (anthocyanin and alkaloid glycoside, Lukaszewicz et al. (2004) J Agric Food Chem 52 1526-1533), Rice (flavonoids & resveratrol, Stark-Lorenzen et al. (1997) Plant Cell Rep 16 668-673, Shin et al. (2006) Plant Biotechnol J 4 303-315), Tomato (+resveratrol, chlorogenic acid, flavonoids, stilbene; Rosati et al. (2000) above, Muir et al. (2001) Nature 19 470-474, Niggeweg et al. (2004) Nat Biotechnol 22 746-754, Giovinazzo et al. (2005) Plant Biotechnol J 3 57-69), wheat (caffeic and ferulic acids, resveratrol; United Press International (2002)); and

[0876] Mineral availabilities such as described for Alfalfa (phytase, Austin-Phillips et al. (1999) http://www.molecularfarming.com/nonmedical.html), Lettuse (iron, Goto et al. (2000) Theor Appl Genet 100 658-664), Rice (iron, Lucca et al. (2002) J Am Coll Nutr 21 184S-190S), Maize, Soybean and wheate (phytase, Drakakaki et al. (2005) Plant Mol Biol 59 869-880, Denbow et al. (1998) Poult Sci 77 878-881, Brinch-Pedersen et al. (2000) Mol Breed 6 195-206).

[0877] In particular embodiments, the value-added trait is related to the envisaged health benefits of the compounds present in the plant. For instance, in particular embodiments, the value-added crop is obtained by applying the methods of the invention to ensure the modification of or induce/increase the synthesis of one or more of the following compounds:

[0878] Carotenoids, such as α-Carotene present in carrots which Neutralizes free radicals that may cause damage to cells or β-Carotene present in various fruits and vegetables which neutralizes free radicals

[0879] Lutein present in green vegetables which contributes to maintenance of healthy vision

[0880] Lycopene present in tomato and tomato products, which is believed to reduce the risk of prostate cancer

[0881] Zeaxanthin, present in citrus and maize, which contributes to maintenance of healthy vision

[0882] Dietary fiber such as insoluble fiber present in wheat bran which may reduce the risk of breast and/or colon cancer and β-Glucan present in oat, soluble fiber present in Psylium and whole cereal grains which may reduce the risk of cardiovascular disease (CVD)

[0883] Fatty acids, such as ω-3 fatty acids which may reduce the risk of CVD and improve mental and visual functions, Conjugated linoleic acid, which may improve body composition, may decrease risk of certain cancers and GLA which may reduce inflammation risk of cancer and CVD, may improve body composition

[0884] Flavonoids such as Hydroxycinnamates, present in wheat which have Antioxidant-like activities, may reduce risk of degenerative diseases, flavonols, catechins and tannins present in fruits and vegetables which neutralize free radicals and may reduce risk of cancer

[0885] Glucosinolates, indoles, isothiocyanates, such as Sulforaphane, present in Cruciferous vegetables (broccoli, kale), horseradish, which neutralize free radicals, may reduce risk of cancer

[0886] Phenolics, such as stilbenes present in grape which May reduce risk of degenerative diseases, heart disease, and cancer, may have longevity effect and caffeic acid and ferulic acid present in vegetables and citrus which have Antioxidant-like activities, may reduce risk of degenerative diseases, heart disease, and eye disease, and epicatechin present in cacao which has Antioxidant-like activities, may reduce risk of degenerative diseases and heart disease

[0887] Plant stanols/sterols present in maize, soy, wheat and wooden oils which May reduce risk of coronary heart disease by lowering blood cholesterol levels

[0888] Fructans, inulins, fructo-oligosaccharides present in Jerusalem artichoke, shallot, onion powder which may improve gastrointestinal health

[0889] Saponins present in soybean, which may lower LDL cholesterol

[0890] Soybean protein present in soybean which may reduce risk of heart disease

[0891] Phytoestrogens such as isoflavones present in soybean which May reduce menopause symptoms, such as hot flashes, may reduce osteoporosis and CVD and lignans present in flax, rye and vegetables, which May protect against heart disease and some cancers, may lower LDL cholesterol, total cholesterol.

[0892] Sulfides and thiols such as diallyl sulphide present in onion, garlic, olive, leek and scallon and Allyl methyl trisulfide, dithiolthiones present in cruciferous vegetables which may lower LDL cholesterol, helps to maintain healthy immune system

[0893] Tannins, such as proanthocyanidins, present in cranberry, cocoa, which may improve urinary tract health, may reduce risk of CVD and high blood pressure.

[0894] In addition, the methods of the present invention also envisage modifying protein/starch functionality, shelf life, taste/aesthetics, fiber quality, and allergen, antinutrient, and toxin reduction traits.

[0895] Accordingly, the invention encompasses methods for producing plants with nutritional added value, said methods comprising introducing into a plant cell a gene encoding an enzyme involved in the production of a component of added nutritional value using the CD-functionalized CRISPR system as described herein and regenerating a plant from said plant cell, said plant characterized in an increase expression of said component of added nutritional value. In particular embodiments, the CD-functionalized CRISPR system is used to modify the endogenous synthesis of these compounds indirectly, e.g. by modifying one or more transcription factors that controls the metabolism of this compound. Methods for introducing a gene of interest into a plant cell and/or modifying an endogenous gene using the CD-functionalized CRISPR system are described herein above.

[0896] Some specific examples of modifications in plants that have been modified to confer value-added traits are: plants with modified fatty acid metabolism, for example, by transforming a plant with an antisense gene of stearyl-ACP desaturase to increase stearic acid content of the plant. See Knultzon et al., Proc. Natl. Acad. Sci. U.S.A. 89:2624 (1992). Another example involves decreasing phytate content, for example by cloning and then reintroducing DNA associated with the single allele which may be responsible for maize mutants characterized by low levels of phytic acid. See Raboy et al, Maydica 35:383 (1990).

[0897] Similarly, expression of the maize (Zea mays) Tfs C1 and R, which regulate the production of flavonoids in maize aleurone layers under the control of a strong promoter, resulted in a high accumulation rate of anthocyanins in Arabidopsis (Arabidopsis thaliana), presumably by activating the entire pathway (Bruce et al., 2000, Plant Cell 12:65-80). DellaPenna (Welsch et al., 2007 Annu Rev Plant Biol 57: 711-738) found that Tf RAP2.2 and its interacting partner SINAT2 increased carotenogenesis in Arabidopsis leaves. Expressing the Tf Dof1 induced the up-regulation of genes encoding enzymes for carbon skeleton production, a marked increase of amino acid content, and a reduction of the Glc level in transgenic Arabidopsis (Yanagisawa, 2004 Plant Cell Physiol 45: 386-391), and the DOF Tf AtDof1.1 (OBP2) up-regulated all steps in the glucosinolate biosynthetic pathway in Arabidopsis (Skirycz et al., 2006 Plant J 47: 10-24).

### Reducing Allergen in Plants

[0898] In particular embodiments the methods provided herein are used to generate plants with a reduced level of allergens, making them safer for the consumer. In particular embodiments, the methods comprise modifying expression of one or more genes responsible for the production of plant allergens. For instance, in particular embodiments, the methods comprise down-regulating expression of a Lo1 p5 gene in a plant cell, such as a ryegrass plant cell and regenerating a plant therefrom so as to reduce allergenicity of the pollen of said plant (Bhalla et al. 1999, Proc. Natl. Acad. Sci. USA Vol. 96: 11676-11680).

[0899] Peanut allergies and allergies to legumes generally are a real and serious health concern. The CD-functionalized CRISPR system of the present invention can be used to identify and then mutate genes encoding allergenic proteins of such legumes. Without limitation as to such genes and proteins, Nicolaou et al. identifies allergenic proteins in peanuts, soybeans, lentils, peas, lupin, green beans, and mung beans. See, Nicolaou et al., Current Opinion in Allergy and Clinical Immunology 2011; 11(3):222).

### Screening Methods for Endogenous Genes of Interest

[0900] The methods provided herein further allow the identification of genes of value encoding enzymes involved in the production of a component of added nutritional value or generally genes affecting agronomic traits of interest, across species, phyla, and plant kingdom. By selectively targeting e.g. genes encoding enzymes of metabolic pathways in plants using the CD-functionalized CRISPR system as described herein, the genes responsible for certain nutritional aspects of a plant can be identified. Similarly, by selectively targeting genes which may affect a desirable agronomic trait, the relevant genes can be identified. Accordingly, the present invention encompasses screening methods for genes encoding enzymes involved in the production of compounds with a particular nutritional value and/or agronomic traits.

### Further Applications of the CD-Functionalized CRISPR System in Plants and Yeasts Use of CD-Functionalized CRISPR System in Biofuel Production

[0901] The term “biofuel” as used herein is an alternative fuel made from plant and plant-derived resources. Renewable biofuels can be extracted from organic matter whose energy has been obtained through a process of carbon fixation or are made through the use or conversion of biomass. This biomass can be used directly for biofuels or can be converted to convenient energy containing substances by thermal conversion, chemical conversion, and biochemical conversion. This biomass conversion can result in fuel in solid, liquid, or gas form. There are two types of biofuels: bioethanol and biodiesel. Bioethanol is mainly produced by the sugar fermentation process of cellulose (starch), which is mostly derived from maize and sugar cane. Biodiesel on the other hand is mainly produced from oil crops such as rapeseed, palm, and soybean. Biofuels are used mainly for transportation.

### Enhancing Plant Properties for Biofuel Production

[0902] In particular embodiments, the methods using the CD-functionalized CRISPR system as described herein are used to alter the properties of the cell wall in order to facilitate access by key hydrolysing agents for a more efficient release of sugars for fermentation. In particular embodiments, the biosynthesis of cellulose and/or lignin are modified. Cellulose is the major component of the cell wall. The biosynthesis of cellulose and lignin are co-regulated. By reducing the proportion of lignin in a plant the proportion of cellulose can be increased. In particular embodiments, the methods described herein are used to downregulate lignin biosynthesis in the plant so as to increase fermentable carbohydrates. More particularly, the methods described herein are used to downregulate at least a first lignin biosynthesis gene selected from the group consisting of 4-coumarate 3-hydroxylase (C3H), phenylalanine ammonia-lyase (PAL), cinnamate 4-hydroxylase (C4H), hydroxycinnamoyl transferase (HCT), caffeic acid O-methyltransferase (COMT), caffeoyl CoA 3-O-methyltransferase (CCoAOMT), ferulate 5-hydroxylase (F5H), cinnamyl alcohol dehydrogenase (CAD), cinnamoyl CoA-reductase (CCR), 4-coumarate-CoA ligase (4CL), monolignol-lignin-specific glycosyltransferase, and aldehyde dehydrogenase (ALDH) as disclosed in WO 2008064289 A2.

[0903] In particular embodiments, the methods described herein are used to produce plant mass that produces lower levels of acetic acid during fermentation (see also WO 2010096488). More particularly, the methods disclosed herein are used to generate mutations in homologs to Cas1L to reduce polysaccharide acetylation.

### Modifying Yeast for Biofuel Production

[0904] In particular embodiments, the CD-functionalized CRISPR system provided herein is used for bioethanol production by recombinant micro-organisms. For instance, the CD-functionalized CRISPR system can be used to engineer micro-organisms, such as yeast, to generate biofuel or biopolymers from fermentable sugars and optionally to be able to degrade plant-derived lignocellulose derived from agricultural waste as a source of fermentable sugars. In some embodiments, the CD-functionalized CRISPR system is used to modify endogenous metabolic pathways which compete with the biofuel production pathway.

[0905] Accordingly, in more particular embodiments, the methods described herein are used to modify a micro-organism as follows: to modify at least one nucleic acid encoding for an enzyme in a metabolic pathway in said host cell, wherein said pathway produces a metabolite other than acetaldehyde from pyruvate or ethanol from acetaldehyde, and wherein said modification results in a reduced production of said metabolite, or to introduce at least one nucleic acid encoding for an inhibitor of said enzyme.

### Modifying Algae and Plants for Production of Vegetable Oils or Biofuels

[0906] Transgenic algae or other plants such as rape may be particularly useful in the production of vegetable oils or biofuels such as alcohols (especially methanol and ethanol), for instance. These may be engineered to express or overexpress high levels of oil or alcohols for use in the oil or biofuel industries.

[0907] According to particular embodiments of the invention, the CD-functionalized CRISPR system is used to generate lipid-rich diatoms which are useful in biofuel production.

[0908] In particular embodiments it is envisaged to specifically modify genes that are involved in the modification of the quantity of lipids and/or the quality of the lipids produced by the algal cell. Examples of genes encoding enzymes involved in the pathways of fatty acid synthesis can encode proteins having for instance acetyl-CoA carboxylase, fatty acid synthase, 3-ketoacyl_acyl-carrier protein synthase III, glycerol-3-phospate deshydrogenase (G3PDH), Enoyl-acyl carrier protein reductase (Enoyl-ACP-reductase), glycerol-3-phosphate acyltransferase, lysophosphatidic acyl transferase or diacylglycerol acyltransferase, phospholipid:diacylglycerol acyltransferase, phoshatidate phosphatase, fatty acid thioesterase such as palmitoyi protein thioesterase, or malic enzyme activities. In further embodiments it is envisaged to generate diatoms that have increased lipid accumulation. This can be achieved by targeting genes that decrease lipid catabolisation. Of particular interest for use in the methods of the present invention are genes involved in the activation of both triacylglycerol and free fatty acids, as well as genes directly involved in (3-oxidation of fatty acids, such as acyl-CoA synthetase, 3-ketoacyl-CoA thiolase, acyl-CoA oxidase activity and phosphoglucomutase. The CD-functionalized CRISPR system and methods described herein can be used to specifically activate such genes in diatoms as to increase their lipid content.

[0909] Organisms such as microalgae are widely used for synthetic biology. Stovicek et al. (Metab. Eng. Comm., 2015; 2:13 describes genome editing of industrial yeast, for example, Saccharomyces cerevisae, to efficiently produce robust strains for industrial production. Stovicek used a CRISPR-Cas9 system codon-optimized for yeast to simultaneously disrupt both alleles of an endogenous gene and knock in a heterologous gene. Cas9 and guide RNA were expressed from genomic or episomal 2μ-based vector locations. The authors also showed that gene disruption efficiency could be improved by optimization of the levels of Cas9 and guide RNA expression. Hlavová et al. (Biotechnol. Adv. 2015) discusses development of species or strains of microalgae using techniques such as CRISPR to target nuclear and chloroplast genes for insertional mutagenesis and screening.

[0910] U.S. Pat. No. 8,945,839 describes a method for engineering Micro-Algae (Chlamydomonas reinhardtii cells) species) using Cas9. Using similar tools, the methods of the CD-functionalized CRISPR system described herein can be applied on Chlamydomonas species and other algae. In particular embodiments, a CRISPR-Cas protein (e.g., Cas13), cytidine deaminase (which may be fused to the CRISPR-Cas protein or an aptamer-binding adaptor protein), and guide RNA are introduced in algae expressed using a vector that expresses the CRISPR-Cas protein and optionally the cytidine deaminase under the control of a constitutive promoter such as Hsp70A-Rbc S2 or Beta2-tubulin. Guide RNA will be delivered using a vector containing T7 promoter. Alternatively, mRNA and in vitro transcribed guide RNA can be delivered to algal cells. Electroporation protocol follows standard recommended protocol from the GeneArt Chlamydomonas Engineering kit.

### The Use of CD-Functionalized CRISPR System in the Generation of Micro-Organisms Capable of Fatty Acid Production

[0911] In particular embodiments, the methods of the invention are used for the generation of genetically engineered micro-organisms capable of the production of fatty esters, such as fatty acid methyl esters (“FAME”) and fatty acid ethyl esters (“FAEE”),

[0912] Typically, host cells can be engineered to produce fatty esters from a carbon source, such as an alcohol, present in the medium, by expression or overexpression of a gene encoding a thioesterase, a gene encoding an acyl-CoA synthase, and a gene encoding an ester synthase. Accordingly, the methods provided herein are used to modify a micro-organisms so as to overexpress or introduce a thioesterase gene, a gene encoding an acyl-CoA synthase, and a gene encoding an ester synthase. In particular embodiments, the thioesterase gene is selected from tesA, ‘tesA, tesB, fatB, fatB2, fatB3, fatAl, or fatA. In particular embodiments, the gene encoding an acyl-CoA synthase is selected from fadDJadK, BH3103, pfl-4354, EAV15023, fadD1, fadD2, RPC_4074, fadDD35, fadDD22, faa39, or an identified gene encoding an enzyme having the same properties. In particular embodiments, the gene encoding an ester synthase is a gene encoding a synthase/acyl-CoA:diacylglycerl acyltransferase from Simmondsia chinensis, Acinetobacter sp. ADP, Alcanivorax borkumensis, Pseudomonas aeruginosa, Fundibacter jadensis, Arabidopsis thaliana, or Alkaligenes eutrophus, or a variant thereof. Additionally or alternatively, the methods provided herein are used to decrease expression in said micro-organism of of at least one of a gene encoding an acyl-CoA dehydrogenase, a gene encoding an outer membrane protein receptor, and a gene encoding a transcriptional regulator of fatty acid biosynthesis. In particular embodiments one or more of these genes is inactivated, such as by introduction of a mutation. In particular embodiments, the gene encoding an acyl-CoA dehydrogenase is fadE. In particular embodiments, the gene encoding a transcriptional regulator of fatty acid biosynthesis encodes a DNA transcription repressor, for example, fabR.

[0913] Additionally or alternatively, said micro-organism is modified to reduce expression of at least one of a gene encoding a pyruvate formate lyase, a gene encoding a lactate dehydrogenase, or both. In particular embodiments, the gene encoding a pyruvate formate lyase is pf1B. In particular embodiments, the gene encoding a lactate dehydrogenase is IdhA. In particular embodiments one or more of these genes is inactivated, such as by introduction of a mutation therein.

[0914] In particular embodiments, the micro-organism is selected from the genus Escherichia, Bacillus, Lactobacillus, Rhodococcus, Synechococcus, Synechoystis, Pseudomonas, Aspergillus, Trichoderma, Neurospora, Fusarium, Humicola, Rhizomucor, Kluyveromyces, Pichia, Mucor, Myceliophtora, Penicillium, Phanerochaete, Pleurotus, Trametes, Chrysosporium, Saccharomyces, Stenotrophamonas, Schizosaccharomyces, Yarrowia, or Streptomyces.

### The Use of CD-Functionalized CRISPR System in the Generation of Micro-Organisms Capable of Organic Acid Production

[0915] The methods provided herein are further used to engineer micro-organisms capable of organic acid production, more particularly from pentose or hexose sugars. In particular embodiments, the methods comprise introducing into a micro-organism an exogenous LDH gene. In particular embodiments, the organic acid production in said micro-organisms is additionally or alternatively increased by inactivating endogenous genes encoding proteins involved in an endogenous metabolic pathway which produces a metabolite other than the organic acid of interest and/or wherein the endogenous metabolic pathway consumes the organic acid. In particular embodiments, the modification ensures that the production of the metabolite other than the organic acid of interest is reduced. According to particular embodiments, the methods are used to introduce at least one engineered gene deletion and/or inactivation of an endogenous pathway in which the organic acid is consumed or a gene encoding a product involved in an endogenous pathway which produces a metabolite other than the organic acid of interest. In particular embodiments, the at least one engineered gene deletion or inactivation is in one or more gene encoding an enzyme selected from the group consisting of pyruvate decarboxylase (pdc), fumarate reductase, alcohol dehydrogenase (adh), acetaldehyde dehydrogenase, phosphoenolpyruvate carboxylase (ppc), D-lactate dehydrogenase (d-ldh), L-lactate dehydrogenase (l-ldh), lactate 2-monooxygenase. In further embodiments the at least one engineered gene deletion and/or inactivation is in an endogenous gene encoding pyruvate decarboxylase (pdc).

[0916] In further embodiments, the micro-organism is engineered to produce lactic acid and the at least one engineered gene deletion and/or inactivation is in an endogenous gene encoding lactate dehydrogenase. Additionally or alternatively, the micro-organism comprises at least one engineered gene deletion or inactivation of an endogenous gene encoding a cytochrome-dependent lactate dehydrogenase, such as a cytochrome B2-dependent L-lactate dehydrogenase.

### The Use of CD-Functionalized CRISPR System in the Generation of Improved Xylose or Cellobiose Utilizing Yeasts Strains

[0917] In particular embodiments, the CD-functionalized CRISPR system may be applied to select for improved xylose or cellobiose utilizing yeast strains. Error-prone PCR can be used to amplify one (or more) genes involved in the xylose utilization or cellobiose utilization pathways. Examples of genes involved in xylose utilization pathways and cellobiose utilization pathways may include, without limitation, those described in Ha, S. J., et al. (2011) Proc. Natl. Acad. Sci. USA 108(2):504-9 and Galazka, J. M., et al. (2010) Science 330(6000):84-6. Resulting libraries of double-stranded DNA molecules, each comprising a random mutation in such a selected gene could be co-transformed with the components of the CD-functionalized CRISPR system into a yeast strain (for instance S288C) and strains can be selected with enhanced xylose or cellobiose utilization capacity, as described in WO2015138855.

### The Use of CD-Functionalized CRISPR System in the Generation of Improved Yeasts Strains for Use in Isoprenoid Biosynthesis

[0918] Tadas Jakočiunas et al. described the successful application of a multiplex CRISPR-Cas9 system for genome engineering of up to 5 different genomic loci in one transformation step in baker's yeast Saccharomyces cerevisiae (Metabolic Engineering Volume 28, March 2015, Pages 213-222) resulting in strains with high mevalonate production, a key intermediate for the industrially important isoprenoid biosynthesis pathway. In particular embodiments, the CD-functionalized CRISPR system may be applied in a multiplex genome engineering method as described herein for identifying additional high producing yeast strains for use in isoprenoid synthesis.

### Improved Plants and Yeast Cells

[0919] The present invention also provides plants and yeast cells obtainable and obtained by the methods provided herein. The improved plants obtained by the methods described herein may be useful in food or feed production through expression of genes which, for instance ensure tolerance to plant pests, herbicides, drought, low or high temperatures, excessive water, etc.

[0920] The improved plants obtained by the methods described herein, especially crops and algae may be useful in food or feed production through expression of, for instance, higher protein, carbohydrate, nutrient or vitamin levels than would normally be seen in the wildtype. In this regard, improved plants, especially pulses and tubers are preferred.

[0921] Improved algae or other plants such as rape may be particularly useful in the production of vegetable oils or biofuels such as alcohols (especially methanol and ethanol), for instance. These may be engineered to express or overexpress high levels of oil or alcohols for use in the oil or biofuel industries.

[0922] The invention also provides for improved parts of a plant. Plant parts include, but are not limited to, leaves, stems, roots, tubers, seeds, endosperm, ovule, and pollen. Plant parts as envisaged herein may be viable, nonviable, regeneratable, and/or non-regeneratable.

[0923] It is also encompassed herein to provide plant cells and plants generated according to the methods of the invention. Gametes, seeds, embryos, either zygotic or somatic, progeny or hybrids of plants comprising the genetic modification, which are produced by traditional breeding methods, are also included within the scope of the present invention. Such plants may contain a heterologous or foreign DNA sequence inserted at or instead of a target sequence. Alternatively, such plants may contain only an alteration (mutation, deletion, insertion, substitution) in one or more nucleotides. As such, such plants will only be different from their progenitor plants by the presence of the particular modification.

[0924] Thus, the invention provides a plant, animal or cell, produced by the present methods, or a progeny thereof. The progeny may be a clone of the produced plant or animal, or may result from sexual reproduction by crossing with other individuals of the same species to introgress further desirable traits into their offspring. The cell may be in vivo or ex vivo in the cases of multicellular organisms, particularly animals or plants.

[0925] The methods for genome editing using the CD-functionalized CRISPR system as described herein can be used to confer desired traits on essentially any plant, algae, fungus, yeast, etc. A wide variety of plants, algae, fungus, yeast, etc and plant algae, fungus, yeast cell or tissue systems may be engineered for the desired physiological and agronomic characteristics described herein using the nucleic acid constructs of the present disclosure and the various transformation methods mentioned above.

[0926] In particular embodiments, the methods described herein are used to modify endogenous genes or to modify their expression without the permanent introduction into the genome of the plant, algae, fungus, yeast, etc of any foreign gene, including those encoding CRISPR components, so as to avoid the presence of foreign DNA in the genome of the plant. This can be of interest as the regulatory requirements for non-transgenic plants are less rigorous.

[0927] The methods described herein generally result in the generation of “improved plants, algae, fungi, yeast, etc” in that they have one or more desirable traits compared to the wildtype plant. In particular embodiments, non-transgenic genetically modified plants, algae, fungi, yeast, etc., parts or cells are obtained, in that no exogenous DNA sequence is incorporated into the genome of any of the cells of the plant. In such embodiments, the improved plants, algae, fungi, yeast, etc. are non-transgenic. Where only the modification of an endogenous gene is ensured and no foreign genes are introduced or maintained in the plant, algae, fungi, yeast, etc. genome, the resulting genetically modified crops contain no foreign genes and can thus basically be considered non-transgenic. The different applications of the CD-functionalized CRISPR system for plant, algae, fungi, yeast, etc. genome editing include, but are not limited to: editing of endogenous genes to confer an agricultural trait of interest. Examplary genes conferring agronomic traits include, but are not limited to genes that confer resistance to pests or diseases; genes involved in plant diseases, such as those listed in WO 2013046247; genes that confer resistance to herbicides, fungicides, or the like; genes involved in (abiotic) stress tolerance. Other aspects of the use of the CRISPR-Cas system include, but are not limited to: create (male) sterile plants; increasing the fertility stage in plants/algae etc; generate genetic variation in a crop of interest; affect fruit-ripening; increasing storage life of plants/algae etc; reducing allergen in plants/algae etc; ensure a value added trait (e.g. nutritional improvement); Screening methods for endogenous genes of interest; biofuel, fatty acid, organic acid, etc production.

### CD-Functionalized CRISPR System can be Used in Non-Human Organisms

[0928] In an aspect, the invention provides a non-human eukaryotic organism; preferably a multicellular eukaryotic organism, comprising a eukaryotic host cell according to any of the described embodiments. In other aspects, the invention provides a eukaryotic organism; preferably a multicellular eukaryotic organism, comprising a eukaryotic host cell according to any of the described embodiments. The organism in some embodiments of these aspects may be an animal; for example a mammal. Also, the organism may be an arthropod such as an insect. The present invention may also be extended to other agricultural applications such as, for example, farm and production animals. For example, pigs have many features that make them attractive as biomedical models, especially in regenerative medicine. In particular, pigs with severe combined immunodeficiency (SCID) may provide useful models for regenerative medicine, xenotransplantation (discussed also elsewhere herein), and tumor development and will aid in developing therapies for human SCID patients. Lee et al., (Proc Natl Acad Sci USA. 2014 May 20; 111(20):7260-5) utilized a reporter-guided transcription activator-like effector nuclease (TALEN) system to generated targeted modifications of recombination activating gene (RAG) 2 in somatic cells at high efficiency, including some that affected both alleles. The CD-functionalized CRISPR system may be applied to a similar system.

[0929] The methods of Lee et al., (Proc Natl Acad Sci USA. 2014 May 20; 111(20):7260-5) may be applied to the present invention analogously as follows. Mutated pigs are produced by targeted modification of RAG2 in fetal fibroblast cells followed by SCNT and embryo transfer. Constructs coding for CRISPR Cas and a reporter are electroporated into fetal-derived fibroblast cells. After 48 h, transfected cells expressing the green fluorescent protein are sorted into individual wells of a 96-well plate at an estimated dilution of a single cell per well. Targeted modification of RAG2 are screened by amplifying a genomic DNA fragment flanking any CRISPR Cas cutting sites followed by sequencing the PCR products. After screening and ensuring lack of off-site mutations, cells carrying targeted modification of RAG2 are used for SCNT. The polar body, along with a portion of the adjacent cytoplasm of oocyte, presumably containing the metaphase II plate, are removed, and a donor cell are placed in the perivitelline. The reconstructed embryos are then electrically porated to fuse the donor cell with the oocyte and then chemically activated. The activated embryos are incubated in Porcine Zygote Medium 3 (PZM3) with 0.5 μM Scriptaid (S7817; Sigma-Aldrich) for 14-16 h. Embryos are then washed to remove the Scriptaid and cultured in PZM3 until they were transferred into the oviducts of surrogate pigs.

[0930] The present invention is also applicable to modifying SNPs of other animals, such as cows. Tan et al. (Proc Natl Acad Sci USA. 2013 Oct. 8; 110(41): 16526-16531) expanded the livestock gene editing toolbox to include transcription activator-like (TAL) effector nuclease (TALEN)- and clustered regularly interspaced short palindromic repeats (CRISPR)/Cas9-stimulated homology-directed repair (HDR) using plasmid, rAAV, and oligonucleotide templates. Gene specific guide RNA sequences were cloned into the Church lab guide RNA vector (Addgene ID: 41824) according to their methods (Mali P, et al. (2013) RNA-Guided Human Genome Engineering via Cas9. Science 339(6121):823-826). The Cas9 nuclease was provided either by co-transfection of the hCas9 plasmid (Addgene ID: 41815) or mRNA synthesized from RCIScript-hCas9. This RCIScript-hCas9 was constructed by sub-cloning the XbaI-AgeI fragment from the hCas9 plasmid (encompassing the hCas9 cDNA) into the RCIScript plasmid.

[0931] Heo et al. (Stem Cells Dev. 2015 Feb. 1; 24(3):393-402. doi: 10.1089/scd.2014.0278. Epub 2014 Nov. 3) reported highly efficient gene targeting in the bovine genome using bovine pluripotent cells and clustered regularly interspaced short palindromic repeat (CRISPR)/Cas9 nuclease. First, Heo et al. generate induced pluripotent stem cells (iPSCs) from bovine somatic fibroblasts by the ectopic expression of yamanaka factors and GSK3β and MEK inhibitor (2i) treatment. Heo et al. observed that these bovine iPSCs are highly similar to naïve pluripotent stem cells with regard to gene expression and developmental potential in teratomas. Moreover, CRISPR-Cas9 nuclease, which was specific for the bovine NANOG locus, showed highly efficient editing of the bovine genome in bovine iPSCs and embryos.

[0932] Igenity® provides a profile analysis of animals, such as cows, to perform and transmit traits of economic traits of economic importance, such as carcass composition, carcass quality, maternal and reproductive traits and average daily gain. The analysis of a comprehensive Igenity® profile begins with the discovery of DNA markers (most often single nucleotide polymorphisms or SNPs). All the markers behind the Igenity® profile were discovered by independent scientists at research institutions, including universities, research organizations, and government entities such as USDA. Markers are then analyzed at Igenity® in validation populations. Igenity® uses multiple resource populations that represent various production environments and biological types, often working with industry partners from the seedstock, cow-calf, feedlot and/or packing segments of the beef industry to collect phenotypes that are not commonly available. Cattle genome databases are widely available, see, e.g., the NAGRP Cattle Genome Coordination Program (http://www.animalgenome.org/cattle/maps/db.html). Thus, the present invention maybe applied to target bovine SNPs. One of skill in the art may utilize the above protocols for targeting SNPs and apply them to bovine SNPs as described, for example, by Tan et al. or Heo et al.

[0933] Qingjian Zou et al. (Journal of Molecular Cell Biology Advance Access published Oct. 12, 2015) demonstrated increased muscle mass in dogs by targeting targeting the first exon of the dog Myostatin (MSTN) gene (a negative regulator of skeletal muscle mass). First, the efficiency of the sgRNA was validated, using cotransfection of the the sgRNA targeting MSTN with a Cas9 vector into canine embryonic fibroblasts (CEFs). Thereafter, MSTN KO dogs were generated by micro-injecting embryos with normal morphology with a mixture of Cas9 mRNA and MSTN sgRNA and auto-transplantation of the zygotes into the oviduct of the same female dog. The knock-out puppies displayed an obvious muscular phenotype on thighs compared with its wild-type littermate sister. This can also be performed using the CD-functionalized CRISPR systems provided herein.

### Livestock—Pigs

[0934] Viral targets in livestock may include, in some embodiments, porcine CD163, for example on porcine macrophages. CD163 is associated with infection (thought to be through viral cell entry) by PRRSv (Porcine Reproductive and Respiratory Syndrome virus, an arterivirus). Infection by PRRSv, especially of porcine alveolar macrophages (found in the lung), results in a previously incurable porcine syndrome (“Mystery swine disease” or “blue ear disease”) that causes suffering, including reproductive failure, weight loss and high mortality rates in domestic pigs. Opportunistic infections, such as enzootic pneumonia, meningitis and ear oedema, are often seen due to immune deficiency through loss of macrophage activity. It also has significant economic and environmental repercussions due to increased antibiotic use and financial loss (an estimated $660m per year).

[0935] As reported by Kristin M Whitworth and Dr Randall Prather et al. (Nature Biotech 3434 published online 7 Dec. 2015) at the University of Missouri and in collaboration with Genus Plc, CD163 was targeted using CRISPR-Cas9 and the offspring of edited pigs were resistant when exposed to PRRSv. One founder male and one founder female, both of whom had mutations in exon 7 of CD163, were bred to produce offspring. The founder male possessed an 11-bp deletion in exon 7 on one allele, which results in a frameshift mutation and missense translation at amino acid 45 in domain 5 and a subsequent premature stop codon at amino acid 64. The other allele had a 2-bp addition in exon 7 and a 377-bp deletion in the preceding intron, which were predicted to result in the expression of the first 49 amino acids of domain 5, followed by a premature stop code at amino acid 85. The sow had a 7 bp addition in one allele that when translated was predicted to express the first 48 amino acids of domain 5, followed by a premature stop codon at amino acid 70. The sow's other allele was unamplifiable. Selected offspring were predicted to be a null animal (CD163−/−), i.e. a CD163 knock out.

[0936] Accordingly, in some embodiments, porcine alveolar macrophages may be targeted by the CRISPR protein. In some embodiments, porcine CD163 may be targeted by the CRISPR protein. In some embodiments, porcine CD163 may be knocked out through induction of a DSB or through insertions or deletions, for example targeting deletion or modification of exon 7, including one or more of those described above, or in other regions of the gene, for example deletion or modification of exon 5.

[0937] An edited pig and its progeny are also envisaged, for example a CD163 knock out pig. This may be for livestock, breeding or modelling purposes (i.e. a porcine model). Semen comprising the gene knock out is also provided.

[0938] CD163 is a member of the scavenger receptor cysteine-rich (SRCR) superfamily. Based on in vitro studies SRCR domain 5 of the protein is the domain responsible for unpackaging and release of the viral genome. As such, other members of the SRCR superfamily may also be targeted in order to assess resistance to other viruses. PRRSV is also a member of the mammalian arterivirus group, which also includes murine lactate dehydrogenase-elevating virus, simian hemorrhagic fever virus and equine arteritis virus. The arteriviruses share important pathogenesis properties, including macrophage tropism and the capacity to cause both severe disease and persistent infection. Accordingly, arteriviruses, and in particular murine lactate dehydrogenase-elevating virus, simian hemorrhagic fever virus and equine arteritis virus, may be targeted, for example through porcine CD163 or homologues thereof in other species, and murine, simian and equine models and knockout also provided.

[0939] Indeed, this approach may be extended to viruses or bacteria that cause other livestock diseases that may be transmitted to humans, such as Swine Influenza Virus (SIV) strains which include influenza C and the subtypes of influenza A known as H1N1, H1N2, H2N1, H3N1, H3N2, and H2N3, as well as pneumonia, meningitis and oedema mentioned above.

[0940] In some embodiments, the CD-functionalized CRISPR system described herein can be used to genetically modify a pig genome to inactivate one or more porcine endogenous retrovirus (PERVs) loci to facilitate clinical application of porcine-to-human xenotransplantation. See Yang et al., Science 350(6264):1101-1104 (2015), which is incorporated herein by reference in its entirety. In some embodiments, the CD-functionalized CRISPR system described herein can be used to produce a genetically modified pig that does not comprise any active porcine endogenous retrovirus (PERVs) locus.

Therapeutic Targeting with CD-Functionalized CRISPR System

[0941] As will be apparent, it is envisaged that CD-functionalized CRISPR system can be used to target any polynucleotide sequence of interest. The invention provides a non-naturally occurring or engineered composition, or one or more polynucleotides encoding components of said composition, or vector or delivery systems comprising one or more polynucleotides encoding components of said composition for use in a modifying a target cell in vivo, ex vivo or in vitro and, may be conducted in a manner alters the cell such that once modified the progeny or cell line of the CRISPR modified cell retains the altered phenotype. The modified cells and progeny may be part of a multi-cellular organism such as a plant or animal with ex vivo or in vivo application of CRISPR system to desired cell types. The CRISPR invention may be a therapeutic method of treatment. The therapeutic method of treatment may comprise gene or genome editing, or gene therapy. Additional diseases that may be treated using the compositions and methods of the present invention are are further disclosed in Clin Var database (Landrum et al., Nucleic Acids Res. 2016 Jan. 4; 44(D1):D862-8; Landrum et al., Nucleic Acids Res. 2014 Jan. 1; 42(1):D980-5; http://www.ncbi.nlm.nih.gov/books/NBK174587/).

### Adoptive Cell Therapies

[0942] The present invention also contemplates use of the CD-functionalized CRISPR system described herein to modify cells for adoptive therapies. Aspects of the invention accordingly involve the adoptive transfer of immune system cells, such as T cells, specific for selected antigens, such as tumor associated antigens (see Maus et al., 2014, Adoptive Immunotherapy for Cancer or Viruses, Annual Review of Immunology, Vol. 32: 189-225; Rosenberg and Restifo, 2015, Adoptive cell transfer as personalized immunotherapy for human cancer, Science Vol. 348 no. 6230 pp. 62-68; and, Restifo et al., 2015, Adoptive immunotherapy for cancer: harnessing the T cell response. Nat. Rev. Immunol. 12(4): 269-281; and Jenson and Riddell, 2014, Design and implementation of adoptive therapy with chimeric antigen receptor-modified T cells. Immunol Rev. 257(1): 127-144). Various strategies may for example be employed to genetically modify T cells by altering the specificity of the T cell receptor (TCR) for example by introducing new TCR α and β chains with selected peptide specificity (see U.S. Pat. No. 8,697,854; PCT Patent Publications: WO2003020763, WO2004033685, WO2004044004, WO2005114215, WO2006000830, WO2008038002, WO2008039818, WO2004074322, WO2005113595, WO2006125962, WO2013166321, WO2013039889, WO2014018863, WO2014083173; U.S. Pat. No. 8,088,379).

[0943] As an alternative to, or addition to, TCR modifications, chimeric antigen receptors (CARs) may be used in order to generate immunoresponsive cells, such as T cells, specific for selected targets, such as malignant cells, with a wide variety of receptor chimera constructs having been described (see U.S. Pat. Nos. 5,843,728; 5,851,828; 5,912,170; 6,004,811; 6,284,240; 6,392,013; 6,410,014; 6,753,162; 8,211,422; and, PCT Publication WO9215322). Alternative CAR constructs may be characterized as belonging to successive generations. First-generation CARs typically consist of a single-chain variable fragment of an antibody specific for an antigen, for example comprising a VL linked to a VH of a specific antibody, linked by a flexible linker, for example by a CD8α hinge domain and a CD8α transmembrane domain, to the transmembrane and intracellular signaling domains of either CD3 or FcRγ (scFv-CD3 or scFv-FcRγ; see U.S. Pat. Nos. 7,741,465; 5,912,172; 5,906,936). Second-generation CARs incorporate the intracellular domains of one or more costimulatory molecules, such as CD28, OX40 (CD134), or 4-1BB (CD137) within the endodomain (for example scFv-CD28/OX40/4-1BB-CD3ζ; see U.S. Pat. Nos. 8,911,993; 8,916,381; 8,975,071; 9,101,584; 9,102,760; 9,102,761). Third-generation CARs include a combination of costimulatory endodomains, such a CD3ζ-chain, CD97, GDI 1a-CD18, CD2, ICOS, CD27, CD154, CDS, OX40, 4-1BB, or CD28 signaling domains (for example scFv-CD28-4-1BB-CD3ζ or scFv-CD28-OX40-CD3ζ; see U.S. Pat. Nos. 8,906,682; 8,399,645; 5,686,281; PCT Publication No. WO2014134165; PCT Publication No. WO2012079000). Alternatively, costimulation may be orchestrated by expressing CARs in antigen-specific T cells, chosen so as to be activated and expanded following engagement of their native αβTCR, for example by antigen on professional antigen-presenting cells, with attendant costimulation. In addition, additional engineered receptors may be provided on the immunoresponsive cells, for example to improve targeting of a T-cell attack and/or minimize side effects.

[0944] Alternative techniques may be used to transform target immunoresponsive cells, such as protoplast fusion, lipofection, transfection or electroporation. A wide variety of vectors may be used, such as retroviral vectors, lentiviral vectors, adenoviral vectors, adeno-associated viral vectors, plasmids or transposons, such as a Sleeping Beauty transposon (see U.S. Pat. Nos. 6,489,458; 7,148,203; 7,160,682; 7,985,739; 8,227,432), may be used to introduce CARs, for example using 2nd generation antigen-specific CARs signaling through CD3ζ and either CD28 or CD137. Viral vectors may for example include vectors based on HIV, SV40, EBV, HSV or BPV.

[0945] Cells that are targeted for transformation may for example include T cells, Natural Killer (NK) cells, cytotoxic T lymphocytes (CTL), regulatory T cells, human embryonic stem cells, tumor-infiltrating lymphocytes (TIL) or a pluripotent stem cell from which lymphoid cells may be differentiated. T cells expressing a desired CAR may for example be selected through co-culture with γ-irradiated activating and propagating cells (AaPC), which co-express the cancer antigen and co-stimulatory molecules. The engineered CAR T-cells may be expanded, for example by co-culture on AaPC in presence of soluble factors, such as IL-2 and IL-21. This expansion may for example be carried out so as to provide memory CAR+ T cells (which may for example be assayed by non-enzymatic digital array and/or multi-panel flow cytometry). In this way, CAR T cells may be provided that have specific cytotoxic activity against antigen-bearing tumors (optionally in conjunction with production of desired chemokines such as interferon-γ). CART cells of this kind may for example be used in animal models, for example to threat tumor xenografts.

[0946] Approaches such as the foregoing may be adapted to provide methods of treating and/or increasing survival of a subject having a disease, such as a neoplasia, for example by administering an effective amount of an immunoresponsive cell comprising an antigen recognizing receptor that binds a selected antigen, wherein the binding activates the immunoreponsive cell, thereby treating or preventing the disease (such as a neoplasia, a pathogen infection, an autoimmune disorder, or an allogeneic transplant reaction). Dosing in CAR T cell therapies may for example involve administration of from 106 to 109 cells/kg, with or without a course of lymphodepletion, for example with cyclophosphamide.

[0947] In one embodiment, the treatment can be administrated into patients undergoing an immunosuppressive treatment. The cells or population of cells, may be made resistant to at least one immunosuppressive agent due to the inactivation of a gene encoding a receptor for such immunosuppressive agent. Not being bound by a theory, the immunosuppressive treatment should help the selection and expansion of the immunoresponsive or T cells according to the invention within the patient.

[0948] The administration of the cells or population of cells according to the present invention may be carried out in any convenient manner, including by aerosol inhalation, injection, ingestion, transfusion, implantation or transplantation. The cells or population of cells may be administered to a patient subcutaneously, intradermally, intratumorally, intranodally, intramedullary, intramuscularly, by intravenous or intralymphatic injection, or intraperitoneally. In one embodiment, the cell compositions of the present invention are preferably administered by intravenous injection.

[0949] The administration of the cells or population of cells can consist of the administration of 10⁴-10⁹ cells per kg body weight, preferably 10⁵ to 10⁶ cells/kg body weight including all integer values of cell numbers within those ranges. Dosing in CAR T cell therapies may for example involve administration of from 10⁶ to 10⁹ cells/kg, with or without a course of lymphodepletion, for example with cyclophosphamide. The cells or population of cells can be administrated in one or more doses. In another embodiment, the effective amount of cells are administrated as a single dose. In another embodiment, the effective amount of cells are administrated as more than one dose over a period time. Timing of administration is within the judgment of managing physician and depends on the clinical condition of the patient. The cells or population of cells may be obtained from any source, such as a blood bank or a donor. While individual needs vary, determination of optimal ranges of effective amounts of a given cell type for a particular disease or conditions are within the skill of one in the art. An effective amount means an amount which provides a therapeutic or prophylactic benefit. The dosage administrated will be dependent upon the age, health and weight of the recipient, kind of concurrent treatment, if any, frequency of treatment and the nature of the effect desired.

[0950] In another embodiment, the effective amount of cells or composition comprising those cells are administrated parenterally. The administration can be an intravenous administration. The administration can be directly done by injection within a tumor.

[0951] To guard against possible adverse reactions, engineered immunoresponsive cells may be equipped with a transgenic safety switch, in the form of a transgene that renders the cells vulnerable to exposure to a specific signal. For example, the herpes simplex viral thymidine kinase (TK) gene may be used in this way, for example by introduction into allogeneic T lymphocytes used as donor lymphocyte infusions following stem cell transplantation (Greco, et al., Improving the safety of cell therapy with the TK-suicide gene. Front. Pharmacol. 2015; 6: 95). In such cells, administration of a nucleoside prodrug such as ganciclovir or acyclovir causes cell death. Alternative safety switch constructs include inducible caspase 9, for example triggered by administration of a small-molecule dimerizer that brings together two nonfunctional icasp9 molecules to form the active enzyme. A wide variety of alternative approaches to implementing cellular proliferation controls have been described (see U.S. Patent Publication No. 20130071414; PCT Patent Publication WO2011146862; PCT Patent Publication WO2014011987; PCT Patent Publication WO2013040371; Zhou et al. BLOOD, 2014, 123/25:3895-3905; Di Stasi et al., The New England Journal of Medicine 2011; 365:1673-1683; Sadelain M, The New England Journal of Medicine 2011; 365:1735-173; Ramos et al., Stem Cells 28(6):1107-15 (2010)).

[0952] In a further refinement of adoptive therapies, genome editing with a CD-functionalized CRISPR-Cas system as described herein may be used to tailor immunoresponsive cells to alternative implementations, for example providing edited CAR T cells (see Poirot et al., 2015, Multiplex genome edited T-cell manufacturing platform for “off-the-shelf” adoptive T-cell immunotherapies, Cancer Res 75 (18): 3853). For example, immunoresponsive cells may be edited to delete expression of some or all of the class of HLA type II and/or type I molecules, or to knockout selected genes that may inhibit the desired immune response, such as the PD1 gene.

[0953] Cells may be edited using a CD-functionalized CRISPR system as described herein. CD-functionalized CRISPR systems may be delivered to an immune cell by any method described herein. In preferred embodiments, cells are edited ex vivo and transferred to a subject in need thereof. Immunoresponsive cells, CAR-T cells or any cells used for adoptive cell transfer may be edited. Editing may be performed to eliminate potential alloreactive T-cell receptors (TCR), disrupt the target of a chemotherapeutic agent, block an immune checkpoint, activate a T cell, and/or increase the differentiation and/or proliferation of functionally exhausted or dysfunctional CD8+ T-cells (see PCT Patent Publications: WO2013176915, WO2014059173, WO2014172606, WO2014184744, and WO2014191128). Editing may result in inactivation of a gene.

[0954] T cell receptors (TCR) are cell surface receptors that participate in the activation of T cells in response to the presentation of antigen. The TCR is generally made from two chains, a and (3, which assemble to form a heterodimer and associates with the CD3-transducing subunits to form the T cell receptor complex present on the cell surface. Each α and β chain of the TCR consists of an immunoglobulin-like N-terminal variable (V) and constant (C) region, a hydrophobic transmembrane domain, and a short cytoplasmic region. As for immunoglobulin molecules, the variable region of the α and β chains are generated by V(D)J recombination, creating a large diversity of antigen specificities within the population of T cells. However, in contrast to immunoglobulins that recognize intact antigen, T cells are activated by processed peptide fragments in association with an MHC molecule, introducing an extra dimension to antigen recognition by T cells, known as MHC restriction. Recognition of MHC disparities between the donor and recipient through the T cell receptor leads to T cell proliferation and the potential development of graft versus host disease (GVHD). The inactivation of TCRα or TCRβ can result in the elimination of the TCR from the surface of T cells preventing recognition of alloantigen and thus GVHD. However, TCR disruption generally results in the elimination of the CD3 signaling component and alters the means of further T cell expansion.

[0955] Allogeneic cells are rapidly rejected by the host immune system. It has been demonstrated that, allogeneic leukocytes present in non-irradiated blood products will persist for no more than 5 to 6 days (Boni, Muranski et al. 2008 Blood 1; 112(12):4746-54). Thus, to prevent rejection of allogeneic cells, the host's immune system usually has to be suppressed to some extent. However, in the case of adoptive cell transfer the use of immunosuppressive drugs also have a detrimental effect on the introduced therapeutic T cells. Therefore, to effectively use an adoptive immunotherapy approach in these conditions, the introduced cells would need to be resistant to the immunosuppressive treatment. Thus, in a particular embodiment, the present invention further comprises a step of modifying T cells to make them resistant to an immunosuppressive agent, preferably by inactivating at least one gene encoding a target for an immunosuppressive agent. An immunosuppressive agent is an agent that suppresses immune function by one of several mechanisms of action. An immunosuppressive agent can be, but is not limited to a calcineurin inhibitor, a target of rapamycin, an interleukin-2 receptor α-chain blocker, an inhibitor of inosine monophosphate dehydrogenase, an inhibitor of dihydrofolic acid reductase, a corticosteroid or an immunosuppressive antimetabolite. The present invention allows conferring immunosuppressive resistance to T cells for immunotherapy by inactivating the target of the immunosuppressive agent in T cells. As non-limiting examples, targets for an immunosuppressive agent can be a receptor for an immunosuppressive agent such as: CD52, glucocorticoid receptor (GR), a FKBP family gene member and a cyclophilin family gene member.

[0956] Immune checkpoints are inhibitory pathways that slow down or stop immune reactions and prevent excessive tissue damage from uncontrolled activity of immune cells. In certain embodiments, the immune checkpoint targeted is the programmed death-1 (PD-1 or CD279) gene (PDCD1). In other embodiments, the immune checkpoint targeted is cytotoxic T-lymphocyte-associated antigen (CTLA-4). In additional embodiments, the immune checkpoint targeted is another member of the CD28 and CTLA4 Ig superfamily such as BTLA, LAG3, ICOS, PDL1 or KIR. In further additional embodiments, the immune checkpoint targeted is a member of the TNFR superfamily such as CD40, OX40, CD137, GITR, CD27 or TIM-3.

[0957] Additional immune checkpoints include Src homology 2 domain-containing protein tyrosine phosphatase 1 (SHP-1) (Watson H A, et al., SHP-1: the next checkpoint target for cancer immunotherapy? Biochem Soc Trans. 2016 Apr. 15; 44(2):356-62). SHP-1 is a widely expressed inhibitory protein tyrosine phosphatase (PTP). In T-cells, it is a negative regulator of antigen-dependent activation and proliferation. It is a cytosolic protein, and therefore not amenable to antibody-mediated therapies, but its role in activation and proliferation makes it an attractive target for genetic manipulation in adoptive transfer strategies, such as chimeric antigen receptor (CAR) T cells. Immune checkpoints may also include T cell immunoreceptor with Ig and ITIM domains (TIGIT/Vstm3/WUCAM/VSIG9) and VISTA (Le Mercier I, et al., (2015) Beyond CTLA-4 and PD-1, the generation Z of negative checkpoint regulators. Front. Immunol. 6:418).

[0958] WO2014172606 relates to the use of MT1 and/or MT1 inhibitors to increase proliferation and/or activity of exhausted CD8+ T-cells and to decrease CD8+ T-cell exhaustion (e.g., decrease functionally exhausted or unresponsive CD8+ immune cells). In certain embodiments, metallothioneins are targeted by gene editing in adoptively transferred T cells.

[0959] In certain embodiments, targets of gene editing may be at least one targeted locus involved in the expression of an immune checkpoint protein. Such targets may include, but are not limited to CTLA4, PPP2CA, PPP2CB, PTPN6, PTPN22, PDCD1, ICOS (CD278), PDL1, KIR, LAG3, HAVCR2, BTLA, CD160, TIGIT, CD96, CRTAM, LAIR1, SIGLEC7, SIGLEC9, CD244 (2B4), TNFRSF10B, TNFRSF10A, CASP8, CASP10, CASP3, CASP6, CASP7, FADD, FAS, TGFBRII, TGFRBRI, SMAD2, SMAD3, SMAD4, SMAD10, SKI, SKIL, TGIF1, IL10RA, IL10RB, HMOX2, IL6R, IL6ST, EIF2AK4, CSK, PAG1, SITZ, FOXP3, PRDM1, BATF, VISTA, GUCY1A2, GUCY1A3, GUCY1B2, GUCY1B3, MT1, MT2, CD40, OX40, CD137, GITR, CD27, SHP-1 or TIM-3. In preferred embodiments, the gene locus involved in the expression of PD-1 or CTLA-4 genes is targeted. In other preferred embodiments, combinations of genes are targeted, such as but not limited to PD-1 and TIGIT.

[0960] In other embodiments, at least two genes are edited. Pairs of genes may include, but are not limited to PD1 and TCRα, PD1 and TCRβ, CTLA-4 and TCRα, CTLA-4 and TCRβ, LAG3 and TCRα, LAG3 and TCRβ, Tim3 and TCRα, Tim3 and TCRβ, BTLA and TCRα, BTLA and TCRβ, BY55 and TCRα, BY55 and TCRβ, TIGIT and TCRα, TIGIT and TCRβ, B7H5 and TCRα, B7H5 and TCRβ, LAIR1 and TCRα, LAIR1 and TCRβ, SIGLEC10 and TCRα, SIGLEC10 and TCRβ, 2B4 and TCRα, 2B4 and TCRβ.

[0961] Whether prior to or after genetic modification of the T cells, the T cells can be activated and expanded generally using methods as described, for example, in U.S. Pat. Nos. 6,352,694; 6,534,055; 6,905,680; 5,858,358; 6,887,466; 6,905,681; 7,144,575; 7,232,566; 7,175,843; 5,883,223; 6,905,874; 6,797,514; 6,867,041; and 7,572,631. T cells can be expanded in vitro or in vivo.

[0962] The practice of the present invention employs techniques known in the field of immunology, biochemistry, chemistry, molecular biology, microbiology, cell biology, genomics and recombinant DNA, which are within the skill of the art. See MOLECULAR CLONING: A LABORATORY MANUAL, 2nd edition (1989) (Sambrook, Fritsch and Maniatis); MOLECULAR CLONING: A LABORATORY MANUAL, 4th edition (2012) (Green and Sambrook); CURRENT PROTOCOLS IN MOLECULAR BIOLOGY (1987) (F. M. Ausubel, et al. eds.); the series METHODS IN ENZYMOLOGY (Academic Press, Inc.); PCR 2: A PRACTICAL APPROACH (1995) (M. J. MacPherson, B. D. Hames and G. R. Taylor eds.); ANTIBODIES, A LABORATORY MANUAL (1988) (Harlow and Lane, eds.); ANTIBODIES A LABORATORY MANUAL, 2nd edition (2013) (E. A. Greenfield ed.); and ANIMAL CELL CULTURE (1987) (R. I. Freshney, ed.).

### Correction of Disease-Associated Mutations and Pathogenic SNPs

[0963] In one aspect, the invention described herein provides methods for modifying an cytidine residue at a target locus with the aim of remedying and/or preventing a diseased condition that is or is likely to be caused by a T(U)-to-C or A-to-G point mutation or a pathogenic single nucleotide polymorphism (SNP).

[0964] Pathogenic T(U)-to-C or A-to-G mutations/SNPs associated with various diseases are reported in the Clin Var database, including but not limited to genetic diseases, cancer, metabolic diseases, or lysosomal storage diseases. Accordingly, an aspect of the invention relates to a method for correcting one or more pathogenic T(U)-to-C or A-to-G mutations/SNPs associated with any of these diseases, as discussed below.

[0965] In some embodiments, the methods, systems, and compositions described herein are used to correct one or more pathogenic T(U)-to-C or A-to-G mutations/SNPs reported in the Clin Var database. In some embodiments, the methods, systems, and compositions described herein are used to correct one or more pathogenic T(U)-to-C or A-to-G mutations/SNPs associated with any of the diseases or disorders disclosed in WO2017/070632, titled “Nucleobase Editor and Uses Thereof,” which is incorporated herein by reference in its entirety. Exemplary diseases or disorders that may be treated include, without limitation, 3-Methylglutaconic aciduria type 2, 46,XY gonadal dysgenesis, 4-Alpha-hydroxyphenylpyruvate hydroxylase deficiency, 6-pyruvoyl-tetrahydropterin synthase deficiency, achromatopsia, Acid-labile subunit deficiency, Acrodysostosis, acroerythrokeratoderma, ACTH resistance, ACTH-independent macronodular adrenal hyperplasia, Activated PBK-delta syndrome, Acute intermittent porphyria, Acute myeloid leukemia, Adams-Oliver syndrome 1/5/6, Adenylosuccinate lyase deficiency, Adrenoleukodystrophy, Adult neuronal ceroid lipofuscinosis, Adult onset ataxia with oculomotor apraxia, Advanced sleep phase syndrome, Age-related macular degeneration, Alagille syndrome, Alexander disease, Allan-Herndon-Dudley syndrome, Alport syndrome, X-linked recessive, Alternating hemiplegia of childhood, Alveolar capillary dysplasia with misalignment of pulmonary veins, Amelogenesis imperfecta, Amyloidogenic transthyretin amyloidosis, Amyotrophic lateral sclerosis, Anemia (nonspherocytic hemolytic, due to G6PD deficiency), Anemia (sideroblastic, pyridoxine-refractory, autosomal recessive), Anonychia, Antithrombin III deficiency, Aortic aneurysm, Aplastic anemia, Apolipoprotein C2 deficiency, Apparent mineralocorticoid excess, Aromatase deficiency, Arrhythmogenic right ventricular cardiomyopathy, Familial hypertrophic cardiomyopathy, Hypertrophic cardiomyopathy, Arthrogryposis multiplex congenital, Aspartylglycosaminuria, Asphyxiating thoracic dystrophy, Ataxia with vitamin E deficiency, Ataxia (spastic), Atrial fibrillation, Atrial septal defect, atypical hemolytic-uremic syndrome, autosomal dominant CD11C+/CD1C+ dendritic cell deficiency, Autosomal dominant progressive external ophthalmoplegia with mitochondrial DNA deletions, Baraitser-Winter syndrome, Bartter syndrome, Basa ganglia calcification, Beckwith-Wiedemann syndrome, Benign familial neonatal seizures, Benign scapuloperoneal muscular dystrophy, Bernard Soulier syndrome, Beta thalassemia intermedia, Beta-D-mannosidosis, Bietti crystalline corneoretinal dystrophy, Bile acid malabsorption, Biotinidase deficiency, Borjeson-Forssman-Lehmann syndrome, Boucher Neuhauser syndrome, Bowen-Conradi syndrome, Brachydactyly, Brown-Vialetto-Van laere syndrome, Brugada syndrome, Cardiac arrhythmia, Cardiofaciocutaneous syndrome, Cardiomyopathy, Carnevale syndrome, Carnitine palmitoyltransferase II deficiency, Carpenter syndrome, Cataract, Catecholaminergic polymorphic ventricular tachycardia, Central core disease, Centromeric instability of chromosomes 1,9 and 16 and immunodeficiency, Cerebral autosomal dominant arteriopathy, Cerebro-oculo-facio-skeletal syndrome, Ceroid lipofuscinosis, Charcot-Marie-Tooth disease, Cholestanol storage disease, Chondrocalcinosis, Chondrodysplasia, Chronic progressive multiple sclerosis, Coenzyme Q10 deficiency, Cohen syndrome, Combined deficiency of factor V and factor VIII, Combined immunodeficiency, Combined oxidative phosphorylation deficiency, Combined partial 1 7-alpha-hydroxylase/17,20-lyase deficiency, Complement factor d deficiency, Complete combined 17-alpha-hydroxylase/17,20-lyase deficiency, Cone-rod dystrophy, Congenital contractural arachnodactyly, Congenital disorder of glycosylation, Congenital lipomatous overgrowth, Neoplasm of ovary, PIK3CA Related Overgrowth Spectrum, Congenital long QT syndrome, Congenital muscular dystrophy, Congenital muscular hypertrophy-cerebral syndrome, Congenital myasthenic syndrome, Congenital myopathy with fiber type disproportion, Eichsfeld type congenital muscular dystrophy, Congenital stationary night blindness, Corneal dystrophy, Cornelia de Lange syndrome, Craniometaphyseal dysplasia, Crigler Najjar syndrome, Crouzon syndrome, Cutis laxa with osteodystrophy, Cyanosis, Cystic fibrosis, Cystinosis, Cytochrome-c oxidase deficiency, Mitochondrial complex I deficiency, D-2-hydroxyglutaric aciduria, Danon disease, Deafness with labyrinthine aplasia microtia and microdontia (LAMM), Deafness, Deficiency of acetyl-CoA acetyltransferase, Deficiency of ferroxidase, Deficiency of UDPglucose-hexose-1-phosphate uridylyltransferase, Dejerine-Sottas disease, Desbuquois syndrome, DFNA, Diabetes mellitus type 2, Diabetes-deafness syndrome, Diamond-Blackfan anemia, Diastrophic dysplasia, Dihydropteridine reductase deficiency, Dihydropyrimidinase deficiency, Dilated cardiomyopathy, Disseminated atypical mycobacterial infection, Distal arthrogryposis, Distal hereditary motor neuronopathy, Donnai Barrow syndrome, Duchenne muscular dystrophy, Becker muscular dystrophy, Dyschromatosis universalis hereditaria, Dyskeratosis congenital, Dystonia, Early infantile epileptic encephalopathy, Ehlers-Danlos syndrome, Eichsfeld type congenital muscular dystrophy, Emery-Dreifuss muscular dystrophy, Enamel-renal syndrome, Epidermolysis bullosa dystrophica inversa, Epidermolysis bullosa herpetiformis, Epilepsy, Episodic ataxia, Erythrokeratodermia variabilis, Erythropoietic protoporphyria, Exercise intolerance, Exudative vitreoretinopathy, Fabry disease, Factor V deficiency, Factor VII deficiency, Factor xiii deficiency, Familial adenomatous polyposis, breast cancer, ovarian cancer, cold urticaria!, chronic infantile neurological, cutaneous and articular syndrome, hemiplegic migraine, hypercholesterolemia, hypertrophic cardiomyopathy, hypoalphalipoproteinemia, hypokalemia-hypomagnesemia, juvenile gout, hyperlipoproteinemia, visceral amyloidosis, hypophosphatemic vitamin D refractory rickets, FG syndrome, Fibrosis of extraocular muscles, Finnish congenital nephrotic syndrome, focal epilepsy, Focal segmental glomerulosclerosis, Frontonasal dysplasia, Frontotemporal dementia, Fructose-biphosphatase deficiency, Gamstorp-Wohlfart syndrome, Ganglioside sialidase deficiency, GATA-I-related thrombocytopenia, Gaucher disease, Giant axonal neuropathy, Glanzmann thrombasthenia, Glomerulocystic kidney disease, Glomerulopathy, Glucocorticoid resistance, Glucose-6-phosphate transport defect, Glutaric aciduria, Glycogen storage disease, Gorlin syndrome, Holoprosencephaly, GRACILE syndrome, Haemorrhagic telangiectasia, Hemochromatosis, Hemoglobin H disease, Hemolytic anemia, Hemophagocytic lymphohistiocytosis, Carcinoma of colon, Myhre syndrome, leukoencephalopathy, Hereditary factor IX deficiency disease, Hereditary factor VIII deficiency disease, Hereditary factor XI deficiency disease, Hereditary fructosuria, Hereditary Nonpolyposis Colorectal Neoplasm, Hereditary pancreatitis, Hereditary pyropoikilocytosis, Elliptocytosis, Heterotaxy, Heterotopia, Histiocytic medullary reticulosis, Histiocytosis-lymphadenopathy plus syndrome, HNSHA due to aldolase A deficiency, Holocarboxylase synthetase deficiency, Homocysteinemia, Rowel-Evans syndrome, Hydatidiform mole, Hypercalciuric hypercalcemia, Hyperimmunoglobulin D, Mevalonic aciduria, Hyperinsulinemic hypoglycemia, Hyperkalemic Periodic Paralysis, Paramyotonia congenita of von Eulenburg, Hyperlipoproteinemia, Hypermanganesemia, Hypermethioninemia, Hyperphosphatasemia, Hypertension, hypomagnesemia, Hypobetalipoproteinemia, Hypocalcemia, Hypogonadotropic hypogonadism, Hypogonadotropic hypogonadism, Hypohidrotic ectodermal dysplasia, Hyper-IgM immunodeficiency, Hypohidrotic X-linked ectodermal dysplasia, Hypomagnesemia, Hypoparathyroidism, Idiopathic fibrosing alveolitis, Immunodeficiency, Immunoglobulin A deficiency, Infantile hypophosphatasia, Infantile Parkinsonism-dystonia, Insulin-dependent diabetes mellitus, Intermediate maple syrup urine disease, Ischiopatellar dysplasia, Islet cell hyperplasia, Isolated growth hormone deficiency, Isolated lutropin deficiency, Isovaleric acidemia, Joubert syndrome, Juvenile polyposis syndrome, Juvenile retinoschisis, Kallmann syndrome, Kartagener syndrome, Kugelberg-W elander disease, Lattice corneal dystrophy, Leber congenital amaurosis, Leber optic atrophy, Left ventricular noncompaction, Leigh disease, Mitochondrial complex I deficiency, Leprechaunism syndrome, Arthrogryposis, Anterior horn cell disease, Leukocyte adhesion deficiency, Leukodystrophy, Leukoencephalopathy, Ovarioleukodystrophy, L-ferritin deficiency, Li-Fraumeni syndrome, Limb-girdle muscular dystrophy-dystroglycanopathy, Loeys-Dietz syndrome, Long QT syndrome, Macrocephaly/autism syndrome, Macular corneal dystrophy, Macular dystrophy, Malignant hyperthermia susceptibility, Malignant tumor of prostate, Maple syrup urine disease, Marden Walker like syndrome, Marfan syndrome, Marie Unna hereditary hypotrichosis, Mast cell disease, Meconium ileus, Medium-chain acyl-coenzyme A dehydrogenase deficiency, Melnick-Fraser syndrome, Mental retardation, Merosin deficient congenital muscular dystrophy, Mesothelioma, Metachromatic leukodystrophy, Metaphyseal chondrodysplasia, Methemoglobinemia, methylmalonic aciduria, homocystinuria, Microcephaly, chorioretinopathy, lymphedema, Microphthalmia, Mild non-PKU hyperphenylalanemia, Mitchell-Riley syndrome, mitochondrial 3-hydroxy-3-methylglutaryl-CoA synthase deficiency, Mitochondrial complex I deficiency, Mitochondrial complex III deficiency, Mitochondrial myopathy, Mucolipidosis III, Mucopolysaccharidosis, Multiple sulfatase deficiency, Myasthenic syndrome, Mycobacterium tuberculosis, Myeloperoxidase deficiency, Myhre syndrome, Myoclonic epilepsy, Myofibrillar myopathy, Myoglobinuria, Myopathy, Myopia, Myotonia congenital, Navajo neurohepatopathy, Nemaline myopathy, Neoplasm of stomach, Nephrogenic diabetes insipidus, Nephronophthisis, Nephrotic syndrome, Neurofibromatosis, Neutral lipid storage disease, Niemann-Pick disease, Non-ketotic hyperglycinemia, Noonan syndrome, Noonan syndrome-like disorder, Norum disease, Macular degeneration, N-terminal acetyltransferase deficiency, Oculocutaneous albinism, Oculodentodigital dysplasia, Ohdo syndrome, Optic nerve aplasia, Omithine carbamoyltransferase deficiency, Orofaciodigital syndrome, Osteogenesis imperfecta, Osteopetrosis, Ovarian dysgenesis, Pachyonychia, Palmoplantar keratoderma, nonepidermolytic, Papillon-Lef\xc3\xa8vre syndrome, Haim-Munk syndrome, Periodontitis, Peeling skin syndrome, Pendred syndrome, Peroxisomal fatty acyl-coa reductase I disorder, Peroxisome biogenesis disorder, Pfeiffer syndrome, Phenylketonuria, Phenylketonuria, Hyperphenylalaninemia, non-PKU, Pituitary hormone deficiency, Pityriasis rubra pilaris, Polyarteritis nodosa, Polycystic kidney disease, Polycystic lipomembranous osteodysplasia, Polymicrogyria, Pontocerebellar hypoplasia, Porokeratosis, Posterior column ataxia, Primary erythromelalgia, hyperoxaluria, Progressive familial intrahepatic cholestasis, Progressive pseudorheumatoid dysplasia, Propionic acidemia, Pseudohermaphroditism, Pseudohypoaldosteronism, Pseudoxanthoma elasticum-like disorder, Purine-nucleoside phosphorylase deficiency, Pyridoxal 5-phosphate-dependent epilepsy, Renal dysplasia, retinal pigmentary dystrophy, cerebellar ataxia, skeletal dysplasia, Reticular dysgenesis, Retinitis pigmentosa, Usher syndrome, Retinoblastoma, Retinopathy, RRM2B-related mitochondrial disease, Rubinstein-Taybi syndrome, Schnyder crystalline corneal dystrophy, Sebaceous tumor, Severe congenital neutropenia, Severe myoclonic epilepsy in infancy, Severe X-linked myotubular myopathy, onychodysplasia, facial dysmorphism, hypotrichosis, Short-rib thoracic dysplasia, Sialic acid storage disease, Sialidosis, Sideroblastic anemia, Small fiber neuropathy, Smith-Magenis syndrome, Sorsby fundus dystrophy, Spastic ataxia, Spastic paraplegia, Spermatogenic failure, Spherocytosis, Sphingomyelin/cholesterol lipidosis, Spinocerebellar ataxia, Split-hand/foot malformation, Spondyloepimetaphyseal dysplasia, Platyspondylic lethal skeletal dysplasia, Squamous cell carcinoma of the head and neck, Stargardt disease, Sucrase-isomaltase deficiency, Sudden infant death syndrome, Supravalvar aortic stenosis, Surfactant metabolism dysfunction, Tangier disease, Tatton-Brown-rahman syndrome, Thoracic aortic aneurysms and aortic dissections, Thrombophilia, Thyroid hormone resistance, TNF receptor-associated periodic fever syndrome (TRAPS), Tooth agenesis, Torsades de pointes, Transposition of great arteries, Treacher Collins syndrome, Tuberous sclerosis syndrome, Tyrosinase-negative oculocutaneous albinism, Tyrosinase-positive oculocutaneous albinism, Tyrosinemia, UDPglucose-4-epimerase deficiency, Ullrich congenital muscular dystrophy, Bethlem myopathy Usher syndrome, UV-sensitive syndrome, Van der Woude syndrome, popliteal pterygium syndrome, Very long chain acyl-CoA dehydrogenase deficiency, Vesicoureteral reflux, Vitreoretinochoroidopathy, Von Rippel-Lindau syndrome, von Willebrand disease, Waardenburg syndrome, Warsaw breakage syndrome, WFSI-Related Disorders, Wilson disease, Xeroderma pigmentosum, X-linked agammaglobulinemia, X-linked hereditary motor and sensory neuropathy, X-linked severe combined immunodeficiency, and Zellweger syndrome.

[0966] In certain embodiments, the methods, systems, and compositions described herein are used to correct one or more pathogenic T(U)-to-C or A-to-G mutations/SNPs as provided in the Table below.

| Candidate | Gene | Disease |
|---|---|---|
| NM_007262.4(PARK7): | PARK7 | Parkinson disease 7 |
| c.497T>C | | |
| (p.Leu166Pro) | | |
| NM_174936.3(PCSK9): | PCSK9 | Hypercholesterolemia, |
| c.646T>C | | autosomal dominant, 3 |
| (p.Phe216Leu) | | |
| NM_000642.2(AGL): | AGL | Glycogen storage |
| c.3083+2T>C | | disease type III |
| NM_213653.3(HFE2): | HFE2 | Hemochromatosis |
| c.842T>C | | type 2A |
| (p.Ile281Thr) | | |
| NM_170707.3(LMNA): | LMNA | Primary dilated |
| c.799T>C | | cardiomyopathy\|not |
| (p.Tyr267His) | | provided |
| NM_000488.3(SERPINC1): | SERPINC1 | Antithrombin III |
| c.1141T>C | | deficiency |
| (p.Ser381Pro) | | |
| NM_000465.3(BARD1): | BARD1 | Familial cancer of |
| c.1159T>C | | breast\|not |
| (p.Phe387Leu) | | specified\|Hereditary |
| | | cancer-predisposing |
| | | syndrome |
| NM_000030.2(AGXT): | AGXT | Primary hyperoxaluria, |
| c.613T>C | | type I\|not provided |
| (p.Ser205Pro) | | |
| NM_001302946.1(TRNT1): | TRNT1 | Sideroblastic anemia |
| c.668T>C | | with B-cell |
| (p.Ile223Thr) | | immunodeficiency, |
| | | periodic fevers, and |
| | | developmental delay |
| NM_138694.3(PKHD1): | PKHD1 | Autosomal recessive |
| c.8068T>C | | polycystic kidney disease |
| (p.Trp2690Arg) | | |
| NM_000162.3(GCK): | GCK | Maturity-onset diabetes |
| c.1169T>C | | of the young, type 2 |
| (p.Ile390Thr) | | |
| NM_017890.4(VPS13B): | VPS13B | Cohen syndrome |
| c.7504+2T>C | | |
| NM_000155.3(GALT): | GALT | Deficiency of UDPglucose- |
| c.512T>C | | hexose-1-phosphate |
| (p.Phe171Ser) | | uridylyltransferase |
| NM_000277.1(PAH): | PAH | Phenylketonuria\|not |
| c.691T>C | | provided |
| (p.Ser231Pro) | | |
| NM_000138.4(FBN1): | FBN1 | Marfan syndrome |
| c.4531T>C | | |
| (p.Cys1511Arg) | | |
| NM_000527.4(LDLR): | LDLR | Familial |
| c.1745T>C | | hypercholesterolemia |
| (p.Leu582Pro) | | |

### Modification of Phosphorylation Sites and Other Post-Translational Modifications

[0967] The present invention also contemplates use of the CD-functionalized CRISPR system described herein to modify phosphorylation sites and other post-translational modifications (PTMs). The CD-functionalized CRISPR system described herein can edit residues associated with post-translational modifications (FIGS. 29A and 29B). Protein phosphorylations are involved in multiple cellular processes and are relatively easy to target (Humprey et al. Trends Endocrinol Metab 2015, 26(12):676-687). Current technologies to target phosphorylations sites or other PTMs include whole protein knockdown or knockout, base editing, and small molecule. These methods, however, all have certain drawbacks. Protein target knockdown or knockout will remove whole protein instead of just the PTMs, base editing is permanent, whereas small molecules are also hard to develop and may have unknown targets. Using the CD-functionalized CRISPR system described herein to remove phosphorylations site may allow study of the function of phosphorylations, for example, it can be used for screening kinase targets to determine relative contributions to phenotype, or for transcriptome-wide screening for potential small molecules. Targeting PTMs using CD-functionalized CRISPR system can also have therapeutic potential in cancer, inflammation, metabolism, and differentiation.

[0968] In certain embodiments, the AD-functionalized CRISPR system described herein can be used to target Stat3 and/or IRF-5 phosphorylation to reduce inflammation. The target sites can be selected from the group consisting of Stat3 Tyr705, IRF-5 Thr10, Ser158, Ser309, Ser317, Ser451 and Ser462, all of which are involved in interleukin signaling and/or autoimmunity (Sadreev et al. PLOS One 2014, 9(10): e110913). Accordingly, an additional aspect of the invention relates to a method for treating or preventing autoimmune disease by targeting the aforementioned phosphorylation sites.

[0969] In certain embodiments, the CD-functionalized CRISPR system described herein can be used to target Insulin receptor substrate (IRS) phosphorylation. The target sites can be selected from the group consisting of Ser-265, Ser-302, Ser-325, Ser-336, Ser-358, Ser-407, and Ser-408 of IRS-1. The phosphorylation of these sites reduces insulin sensitivity (Copps and White Diabetologia 2012, October; 55(10):2565-2582), and reducing inhibitory serine phosphorylation at these sites can rescue insulin sensitivity. Accordingly, an additional aspect of the invention relates to a method for treating or preventing diabetes by targeting the aforementioned phosphorylation sites.

### Making Hypomorphic Mutations

[0970] In certain embodiments, the CD-functionalized CRISPR system described herein can be used to make hypomorphic mutations. Engineering hypomorphic mutations can lead to significant downregulation of essential genes without lethality, which allows for straightforward creation of models for diseases that involve hypomorphic mutations and decreasing levels of certain proteins in a fine-tuned manner for therapeutic applications. PolyA track insertion is an existing technology to create hypomorphic mutants. Using the CD-functionalized CRISPR system for introducing hypomorphic mutations is minimally disruptive, precise, and can be fine-tuned.

[0971] In certain embodiments, the CD-functionalized CRISPR system can be used for targeted editing of immune checkpoint proteins. Immune checkpoint blockade is used in cancer therapy to enhance anti-tumor immunity by promoting T-cell activation and proliferation, which includes anti-CTLA4 and anti-PD-1 therapies (Byun et al., Nat Reviews Endocrinology 2017). Using the CD-functionalized CRISPR system can improve efficacy over existing CTLA-4, PD-1/PD-L1 inhibitor therapies. The AD-functionalized CRISPR system can also be employed to inhibit other suppressive immune checkpoints (such as TIM-3, KIRs, and LAG-3) and to introduce hypomorphic mutations to immune activating checkpoints such as 4-IBB and GITR. In particular embodiments, the CD-functionalized CRISPR system can be used for targeted editing of CTLA-4/B7-1 interaction surface ⁹⁹MYPPPY¹⁰⁴ stem loop (Stamper et. al., Nature 2001 Mar. 29; 410(6828):608-11), for example, the C-to-U editing can convert proline to serine or leucine. In particular embodiments, the CD-functionalized CRISPR system can be used for targeted editing of CTLA-4/B7-2 interface at E33, R35, T53, and E97 (Schwartz et. al., Nature 2001 Mar. 29; 410(6828):604-8; Peach et. al., Cell (1994)), for example, the C-to-U editing can convert arginine to cysteine, stop codon, or tryptophan. Accordingly, an additional aspect of the invention relates to a method for treating or preventing cancer by editing the aforementioned residues involved in immune checkpoint protein interactions.

### Modulating Protein Stability

[0972] In certain embodiments, the CD-functionalized CRISPR system described herein can be used to modulate protein stability. In particular embodiments, the CD-functionalized CRISPR system can be used for general degron targeting. A degron is a portion of a protein that is important in regulation of protein degradation rates. Known degrons include short amino acid sequences, structural motifs and exposed amino acids (often Lysine or Arginine) located anywhere in the protein. Some proteins can contain multiple degrons. While there are many types of different degrons, and a high degree of variability even within these groups, degrons are all similar for their involvement in regulating the rate of a protein degradation and can be categorized as “Ubiquitin-dependent” or “Ubiquitin-independent”.

[0973] In certain example embodiments, the CD-functionalized CRISPR system can be used for targeted editing of the degron present in SMN2, a protein involved in spinal muscular atrophy (SMA). SMA is caused by homozygous survival of motor neurons 1 (SMN1) gene deletions, leaving a duplicate gene, SMN2, as the sole source of SMN protein. SMA disease severity correlates to the amount of functional protein. For example, severe SMA (type I) patients typically have one or two SMN2 copies, intermediate severity SMA (type II) patients usually have three SMN2 copies, and patients with mild SMA (type III) mostly have three or four SMN2 copies. Most of the mRNA produced from SMN2 pre-mRNA is exon 7-skipped (about 80%), resulting in a highly unstable and almost undetectable protein (SMNDelta7). This splicing defect creates a degradation signal (degron; SMNDelta7-DEG) at SMNDelta7's C-terminal 15 amino acids. The S270A mutation inactivates SMNDelta7-DEG, generating a stable SMNDelta7 that rescues viability of SMN-deleted cells. (Cho and Dreyfuss, Genes and Dev., 2010 Mar. 1; 24(5):438-42). The CD-functionalized CRISPR system can be used for targeted editing of 5270, thereby disrupts the degron present in SMN2. Accordingly, an additional aspect of the invention relates to a method for treating or preventing SMA by editing the aforementioned residues involved in regulating SMN stability.

[0974] In certain embodiments, the CD-functionalized CRISPR system can be used for disrupting the D-box degrons, resulting in the conversion of Leu to The. In other embodiments, the CD-functionalized CRISPR system can be used for disrupting the KEN-box degrons, resulting in the conversion of Lys to Arg/Glu, Glu to Gly, or Asn to Ser/Asp.

[0975] The N-degrons were first characterized in yeast to the PEST sequence of mouse ornithine decarboxylase. A PEST sequence is a peptide sequence that is rich in proline (P), glutamic acid (E), serine (S), and threonine (T). This sequence is associated with proteins that have a short intracellular half-life; hence, it is hypothesized that the PEST sequence acts as a signal peptide for protein degradation. The CD-functionalized CRISPR system can be used for targeted editing of the PEST sequence, hence regulating protein stability. In particular example embodiments, the AD-functionalized CRISPR system can be used for targeting the PEST sequence or a regulated, ubiquitin-independent degron in IκBα (Fortmann et al, JMB Molecular Bio 2015, Aug. 28; 427(17): 2748-2756). In particular embodiments, the AD-functionalized CRISPR system can be used for editing a PEST sequence in NANOG to promote embryonic stem cell (ESC) pluripotency. In particular embodiments, the CD-functionalized CRISPR system can be used for editing a PEST sequence in Cdc25A phosphatase. In other embodiments, the CD-functionalized CRISPR system can also be employed to facilitate protein degradation, for example, by mutating the residues to enhance the degree of degradation or by mutating the N-terminal methionine.

### Targeting Ion Channels for Therapy

[0976] In certain embodiments, the CD-functionalized CRISPR system described herein can be used to target ion channels. Ions regulate many physiological processes, including heart contractility, nervous system signal transduction, and control of pulmonary vasculature pressure. Small molecules that affect ion channels, such as Digoxin and Lidocaine are widely used in clinical medicine. These small molecules, however, have toxicity issues and only act on shorter time scales whereas the diseases being treated such as heart failure or arrhythmias, are often chronic. Knockdown approach is also not desirable as it may affect other biological roles played by the ion channels.

[0977] In certain embodiments, the CD-functionalized CRISPR system can be used to make stop codons to block ion channels. In certain embodiments, the AD-functionalized CRISPR system can be used to make stop codons to skip exons. The ion channels can be sodium or potassium ion channels. In particular embodiments, the CD-functionalized CRISPR system can be used to make mutations selected from the group consisting of V36I, F216S, S241T, R277X, Y328X, N395K, 5459X, E693X, I767X, R830X, I848T, L858H, L858H, L858F, A863P, W897X, R996C, F1200LfsX33, I1235LfsX2, V1298F, V1298D, V1299F, F1449V, c.4336-7_10delGTTTX, I1461T, F1462V, T14641, R1488X, M1267K, K1659X, W1689X in the sodium-channel subunit Nav1.7 (Drenth and Waxman, J C I, 2007, December; 117(12):3603-9). In certain embodiments, the CD-functionalized CRISPR system can be used to edit RNA in neurons. The resulting ion channel activity change can be assessed via patch-clamping and pain sensitivity can be examined using existing mouse models (Gao et al., J Neurosci. 2009 Apr. 1; 29(13):4096-108). Accordingly, an additional aspect of the invention relates to a method for treating or preventing heart failure or arrhythmia by editing the aforementioned residues involved in ion channel activities.

### TGFbeta Modulation to Prevent Cardiac Remodeling

[0978] In certain embodiments, the CD-functionalized CRISPR system can be used to modulate TGFbeta signaling to prevent cardiac remodeling. After myocardial infarction, TGFbeta signaling promotes cardiac fibrosis and cardiomyocyte apoptosis and blocks the inflammatory response that can heal the cardiac tissue. Therefore negative heart remodeling can be prevented by blocking TGFbeta signaling. The type II TGFbeta receptor requires autophosphorylation at Ser213 and Ser409 as well as Thr259, 336, and 424 for activity. The CD-functionalized CRISPR system can be used to mutate the serines to Leu or Phe, or tyrosines to Cys, which can prevent autophosphorylation and TGFbeta activation in fibroblasts and cardiomyocytes.

[0979] In certain embodiments, the CD-functionalized CRISPR system can be used to mutate the Smad transcription factors downstream of the TGFbeta receptor to prevent their activation via phosphorylation. The CD-functionalized CRISPR system can mutate the phosphorylation sites selected from the group consisting of Thr8, Thr179, Ser208, and Ser213 of Smad3 and Ser245, Ser250, Ser255, and Thr8 of Smad2. The CD-functionalized CRISPR system can be used to mutate the serines to Leu or Phe, or threonines to Ile or Met. Accordingly, an additional aspect of the invention relates to a method for preventing cardiac remodeling by editing the aforementioned residues involved in TGFbeta signaling.

### Other Applications

[0980] In certain embodiments, the CD-functionalized CRISPR system can be used in lineage tracing. In certain embodiments, the CD-functionalized CRISPR system can be used for sensing with REPAIR system. Different orthologs can be induced and editing can be focused on synthetic transcripts. In certain embodiments, the CD-functionalized CRISPR system can be used for saturation mutagenesis on specific proteins to identify functional domains. In certain embodiments, the CD-functionalized CRISPR system can be used to identify RNA binding protein interactions. The CD-functionalized CRISPR system can be used to map protein-protein binding interfaces. Saturation mutagenesis on be performed on one protein followed by FRET and cell sorting to determine which guide RNA disrupts protein-protein interactions.

[0981] In certain embodiments, the CD-functionalized CRISPR system can be used for transient inactivation or activation of proteins, generating heterozygous protective mutations, pre or pro-protein cleavage sites, generation of neoantigens, creating conditional fusion proteins, editing of poly-A signals, RNA targeting to introduce other epitranscriptomic modifications, for identification or modification of RNA binding protein sites, mapping RNA-RNA contacts, or editing co-localized RNPs.

[0982] In some embodiments, the CD-functionalized CRISPR system can be used for modification ubiquitination or acetylation sites, tissue regeneration, cell differentiation, creating motifs recognized by ubiquitin ligases, single cell barcoding, creating splice sites, or altering antigen receptors.

[0983] The embodiments, illustratively described herein may suitably be practiced in the absence of any element or elements, limitation or limitations, not specifically disclosed herein. Thus, for example, the terms “comprising,” “including,” “containing,” etc. shall be read expansively and without limitation. Additionally, the terms and expressions employed herein have been used as terms of description and not of limitation, and there is no intention in the use of such terms and expressions of excluding any equivalents of the features shown and described or portions thereof, but it is recognized that various modifications are possible within the scope of the claimed technology. Additionally, the phrase “consisting essentially of” will be understood to include those elements specifically recited and those additional elements that do not materially affect the basic and novel characteristics of the claimed technology. The phrase “consisting of” excludes any element not specified.

[0984] The present disclosure is not to be limited in terms of the particular embodiments described in this application. Many modifications and variations can be made without departing from its spirit and scope, as will be apparent to those skilled in the art. Functionally equivalent methods and compositions within the scope of the disclosure, in addition to those enumerated herein, will be apparent to those skilled in the art from the foregoing descriptions. Such modifications and variations are intended to fall within the scope of the appended claims. The present disclosure is to be limited only by the terms of the appended claims, along with the full scope of equivalents to which such claims are entitled. It is to be understood that this disclosure is not limited to particular methods, reagents, compounds compositions or biological systems, which can of course vary. It is also to be understood that the terminology used herein is for the purpose of describing particular embodiments only, and is not intended to be limiting.

[0985] Additional pathogenic C>T mutations and SNPs are also found in the Clin Var database. Accordingly, an additional aspect of the present disclosure relates to correction of a pathogenic C>T mutation or SNP listed in Clin Var using the methods, systems, and compositions described herein to treat or prevent a disease or condition associated therewith. Other T mutations or SNPS that may be addressed using the embodiments disclosed herein are listed in a table found in the ASCII text filed entitled “Clin_var_pathogenic_SNPS_TC_txt” filed herewith.

[0986] In addition, where features or aspects of the disclosure are described in terms of Markush groups, those skilled in the art will recognize that the disclosure is also thereby described in terms of any individual member or subgroup of members of the Markush group.

[0987] As will be understood by one skilled in the art, for any and all purposes, particularly in terms of providing a written description, all ranges disclosed herein also encompass any and all possible subranges and combinations of subranges thereof. Any listed range can be easily recognized as sufficiently describing and enabling the same range being broken down into at least equal halves, thirds, quarters, fifths, tenths, etc. As a non-limiting example, each range discussed herein can be readily broken down into a lower third, middle third and upper third, etc. As will also be understood by one skilled in the art all language such as “up to,” “at least,” “greater than,” “less than,” and the like, include the number recited and refer to ranges which can be subsequently broken down into subranges as discussed above. Finally, as will be understood by one skilled in the art, a range includes each individual member.

[0988] All publications, patent applications, issued patents, and other documents referred to in this specification are herein incorporated by reference as if each individual publication, patent application, issued patent, or other document was specifically and individually indicated to be incorporated by reference in its entirety. Definitions that are contained in text incorporated by reference are excluded to the extent that they contradict definitions in this disclosure.

[0989] Other embodiments are set forth in the following claims.

### WORKING EXAMPLES

### Example 1

[0990] To test Cas13-guided cytosine deaminase editing, multiple C-terminal fusions of various cytosine deaminases from human and related species were designed (https://www.ncbi.nlm.nih.gov/pubmed/21568845, Lada et al. (2011), Biochemistry (Mosc.), 76(1):131-46), see also the Table below. To initially test for activity, reactivation of a start codon in Crypidina luciferase is tested (FIG. 1A).

APOBEC designs

| Name | Gene | Species | Protein sequence |
|---|---|---|---|
| Apobec-3A | huABC3A | human | MEASPASGPRHLMDPHIFTSNFNNGIGRHKTYLC |
| (SEQ ID No. | | | YEVERLDNGTSVKMDQHRGFLHNQAKNLLCGFYG |
| 195) | | | RHAELRFLDLVPSLQLDPAQIYRVTWFISWSPCF |
| | | | SWGCAGEVRAFLQENTHVRLRIFAARIYDYDPLY |
| | | | KEALQMLRDAGAQVSIMTYDEFKHCWDTFVDHQG |
| | | | CPFQPWDGLDEHSQALSGRLRAILQNQGN |
| Apobec-3G | huABC3G | human | MKPHFRNTVERMYRDTFSYNFYNRPILSRRNTVW |
| (SEQ ID No. | | | LCYEVKTKGPSRPPLDAKIFRGQVYSELKYHPEM |
| 196) | | | RFFHWFSKWRKLHRDQEYEVTWYISWSPCTKCTR |
| | | | DMATFLAEDPKVTLTIFVARLYYFWDPDYQEALR |
| | | | SLCQKRDGPRATMKIMNYDEFQHCWSKFVYSQRE |
| | | | LFEPWNNLPKYYILLHIMLGEILRHSMDPPTFTF |
| | | | NFNNEPWVRGRHETYLCYEVERMHNDTWVLLNQR |
| | | | RGFLCNQAPHKHGFLEGRHAELCFLDVIPFWKLD |
| | | | LDQDYRVTCFTSWSPCFSCAQEMAKFISKNKHVS |
| | | | LCIFTARIYDDQGRCQEGLRTLAEAGAKISIMTY |
| | | | SEFKHCWDTFVDHQGCPFQPWDGLDEHSQDLSGR |
| | | | LRAILQNQEN |
| Apobec1 | huABEC1 | human | MTSEKGPSTGDPTLRRRIEPWEFDVFYDPRELRK |
| (SEQ ID No. | | | EACLLYEIKWGMSRKIWRSSGKNTTNHVEVNFIK |
| 197) | | | KFTSERDFHPSMSCSITWFLSWSPCWECSQAIRE |
| | | | FLSRHPGVTLVIYVARLFWHMDQQNRQGLRDLVN |
| | | | SGVTIQIMRASEYYHCWRNFVNYPPGDEAHWPQY |
| | | | PPLWMMLYALELHCIILSLPPCLKISRRWQNHLT |
| | | | FFRLHLQNCHYQTIPPHILLATGLIHPSVAWR |
| AID | huAICDA | human | MDSLLMNRRKFLYQFKNVRWAKGRRETYLCYVVK |
| (SEQ ID No. | | | RRDSATSFSLDFGYLRNKNGCHVELLFLRYISDW |
| 198) | | | DLDPGRCYRVTWFTSWSPCYDCARHVADFLRGNP |
| | | | NLSLRIFTARLYFCEDRKAEPEGLRRLHRAGVQI |
| | | | AIMTFKDYFYCWNTFVENHERTFKAWEGLHENSV |
| | | | RLSRQLRRILLPLYEVDDLRDAFRTLGL |
| ABEC1 | mABEC1 | mouse | MSSETGPVAVDPTLRRRIEPHEFEVFFDPRELRK |
| (SEQ ID No. | | | ETCLLYEINWGGRHSVWRHTSQNTSNHVEVNFLE |
| 199) | | | KFTTERYFRPNTRCSITWFLSWSPCGECSRAITE |
| | | | FLSRHPYVTLFIYIARLYHHTDQRNRQGLRDLIS |
| | | | SGVTIQIMTEQEYCYCWRNFVNYPPSNEAYWPRY |
| | | | PHLWVKLYVLELYCIILGLPPCLKILRRKQPQLT |
| | | | FFTITLQTCHYQRIPPHLLWATGLK |
| ABEC1 | rABEC1 | rat | MSSETGPVAVDPTLRRRIEPHEFEVFFDPRELRK |
| (SEQ ID No. | | | ETCLLYEINWGGRHSIWRHTSQNTNKHVEVNFIE |
| 200) | | | KFTTERYFCPNTRCSITWFLSWSPCGECSRAITE |
| | | | FLSRYPHVTLFIYIARLYHHADPRNRQGLRDLIS |
| | | | SGVTIQIMTEQESGYCWRNFVNYSPSNEAHWPRY |
| | | | PHLWVRLYVLELYCIILGLPPCLNILRRKQPQLT |
| | | | FFTIALQSCHYQRLPPHILWATGLK |

[0991] 11 guides were designed (FIG. 1B): 5 guides positioned 5′ to the edit, 5 guides positioned 3′ to the edit, and an overlapping guide. Upon successful editing, the threonine (encoded by ACG) will be converted to a methionine/start (encoded by AUG) allowing for expression.

[0992] Additional guides were designed to test guide design on cytidine deaminase activity of various fusion protein constructs. See FIG. 5 and FIG. 6. The guide sequences used are provided in the Tables below

| | | | | | Bottom |
|---|---|---|---|---|---|
| | | | | | order |
| | | | | | (SEQ |
| | | | Revcom | | ID |
| | Guide_sequence | Guide_seq + G | (SEQ ID | Top order | Nos. |
| | (SEQ ID Nos. | (SEQ ID Nos. | Nos. 233- | (SEQ ID Nos. 249- | 265- |
| Position | 201-216) | 217-232) | 248) | 264) | 280) |
| 0 | CTCTTTGTCG | GCTCTTTGTC | cgctgccaca | caccGCTCTTTGT | Caaccgctg |
| | CCTTCGTAGG | GCCTTCGTAG | cctacgaagg | CGCCTTCGTAG | ccacacctac |
| | TGTGGCAGCG | GTGTGGCAGC | cgacaaagag | GTGTGGCAGCG | gaaggcgac |
| | | G | c | | aaagagc |
| 6 | GTCGCCTTCG | GGTCGCCTTC | ccaggacgct | caccGGTCGCCTT | Caacccagg |
| | TAGGTGTGGC | GTAGGTGTGG | gccacaccta | CGTAGGTGTGG | acgctgccac |
| | AGCGTCCTGG | CAGCGTCCTG | cgaaggcga | CAGCGTCCTGG | acctacgaag |
| | | G | cc | | gcgacc |
| 12 | TTCGTAGGTG | GTTCGTAGGT | ttcatcccagg | caccGTTCGTAG | Caacttcatc |
| | TGGCAGCGTC | GTGGCAGCGT | acgctgccac | GTGTGGCAGCG | ccaggacgct |
| | CTGGGATGAA | CCTGGGATGA | acctacgaac | TCCTGGGATGA | gccacaccta |
| | | A | | A | cgaac |
| 18 | GGTGTGGCAG | GGGTGTGGCA | aagaagttcat | caccGGGTGTGG | Caacaagaa |
| | CGTCCTGGGA | GCGTCCTGGG | cccaggacgc | CAGCGTCCTGG | gttcatcccag |
| | TGAACTTCTT | ATGAACTTCT | tgccacaccc | GATGAACTTCT | gacgctgcca |
| | | T | | T | caccc |
| 24 | GCAGCGTCCT | GGCAGCGTCC | aagatgaaga | caccGGCAGCGT | Caacaagat |
| | GGGATGAACT | TGGGATGAAC | agttcatccca | CCTGGGATGAA | gaagaagttc |
| | TCTTCATCTT | TTCTTCATCTT | ggacgctgcc | CTTCTTCATCTT | atcccaggac |
| | | | | | gctgcc |
| 30 | TCCTGGGATG | GTCCTGGGAT | acgcccaaga | caccGTCCTGGG | Caacacgcc |
| | AACTTCTTCA | GAACTTCTTC | tgaagaagttc | ATGAACTTCTT | caagatgaag |
| | TCTTGGGCGT | ATCTTGGGCG | atcccaggac | CATCTTGGGCG | aagttcatccc |
| | | T | | T | aggac |
| 36 | GATGAACTTC | GGATGAACTT | aagcgcacgc | caccGGATGAAC | Caacaagcg |
| | TTCATCTTGG | CTTCATCTTG | ccaagatgaa | TTCTTCATCTTG | cacgcccaa |
| | GCGTGCGCTT | GGCGTGCGCT | gaagttcatcc | GGCGTGCGCTT | gatgaagaag |
| | | T | | | ttcatcc |
| 42 | CTTCTTCATC | GCTTCTTCATC | cacatcaagc | caccGCTTCTTCA | Caaccacatc |
| | TTGGGCGTGC | TTGGGCGTGC | gcacgcccaa | TCTTGGGCGTG | aagcgcacg |
| | GCTTGATGTG | GCTTGATGTG | gatgaagaag | CGCTTGATGTG | cccaagatga |
| | | | c | | agaagc |
| 48 | CATCTTGGGC | GCATCTTGGG | ctgtcccacat | caccGCATCTTG | Caacctgtcc |
| | GTGCGCTTGA | CGTGCGCTTG | caagcgcacg | GGCGTGCGCTT | cacatcaagc |
| | TGTGGGACAG | ATGTGGGACA | cccaagatgc | GATGTGGGACA | gcacgccca |
| | | G | | G | agatgc |
| 54 | GGGCGTGCGC | GGGGCGTGCG | atctgcctgtc | caccGGGGCGTG | Caacatctgc |
| | TTGATGTGGG | CTTGATGTGG | ccacatcaag | CGCTTGATGTG | ctgtcccacat |
| | ACAGGCAGA | GACAGGCAGA | cgcacgcccc | GGACAGGCAG | caagcgcac |
| | T | T | | AT | gcccc |
| 60 | GCGCTTGATG | GGCGCTTGAT | tgtctgatctg | caccGGCGCTTG | Caactgtctg |
| | TGGGACAGG | GTGGGACAGG | cctgtcccaca | ATGTGGGACAG | atctgcctgtc |
| | CAGATCAGAC | CAGATCAGAC | tcaagcgcc | GCAGATCAGAC | ccacatcaag |
| | A | A | | A | cgcc |
| 66 | GATGTGGGAC | GGATGTGGGA | aggggctgtc | caccGGATGTGG | Caacagggg |
| | AGGCAGATC | CAGGCAGATC | tgatctgcctg | GACAGGCAGAT | ctgtctgatct |
| | AGACAGCCCC | AGACAGCCCC | tcccacatcc | CAGACAGCCCC | gcctgtccca |
| | T | T | | T | catcc |
| 72 | GGACAGGCA | GGGACAGGCA | tgcaccaggg | caccGGGACAGG | Caactgcac |
| | GATCAGACA | GATCAGACAG | gctgtctgatc | CAGATCAGACA | caggggctgt |
| | GCCCCTGGTG | CCCCTGGTGC | tgcctgtccc | GCCCCTGGTGC | ctgatctgcct |
| | CA | A | | A | gtccc |
| 78 | GCAGATCAG | GGCAGATCAG | gctggctgca | caccGGCAGATC | Caacgctgg |
| | ACAGCCCCTG | ACAGCCCCTG | ccaggggctg | AGACAGCCCCT | ctgcaccagg |
| | GTGCAGCCAG | GTGCAGCCAG | tctgatctgcc | GGTGCAGCCAG | ggctgtctgat |
| | C | C | | C | ctgcc |
| 84 | CAGACAGCCC | GCAGACAGCC | cggaaagctg | caccGCAGACAG | Caaccggaa |
| | CTGGTGCAGC | CCTGGTGCAG | gctgcaccag | CCCCTGGTGCA | agctggctgc |
| | CAGCTTTCCG | CCAGCTTTCC | gggctgtctg | GCCAGCTTTCC | accaggggct |
| | | G | c | G | gtctgc |
| NT | GTAATGCCTG | GGTAATGCCT | cagactatgc | caccGGTAATGC | Caaccagac |
| | GCTTGTCGAC | GGCTTGTCGA | gtcgacaagc | CTGGCTTGTCG | tatgcgtcga |
| | GCATAGTCTG | CGCATAGTCT | caggcattac | ACGCATAGTCT | caagccagg |
| | | G | c | G | cattacc |

| | | | | |
|---|---|---|---|---|
| Well position | Sequence Name | Sequence | SEQ ID Nos. | 281-312 |

| | | |
|---|---|---|
| A1 | Guide_0_F | caccGCTCTTTGTCGCCTTCGTAGGTGTGGCAGCG |
| B1 | Guide_6_F | caccGGTCGCCTTCGTAGGTGTGGCAGCGTCCTGG |
| C1 | Guide_12_F | caccGTTCGTAGGTGTGGCAGCGTCCTGGGATGAA |
| D1 | Guide_18_F | caccGGGTGTGGCAGCGTCCTGGGATGAACTTCTT |
| E1 | Guide_24_F | caccGGCAGCGTCCTGGGATGAACTTCTTCATCTT |
| F1 | Guide_30_F | caccGTCCTGGGATGAACTTCTTCATCTTGGGCGT |
| G1 | Guide_36_F | caccGGATGAACTTCTTCATCTTGGGCGTGCGCTT |
| H1 | Guide_42_F | caccGCTTCTTCATCTTGGGCGTGCGCTTGATGTG |
| A2 | Guide_48_F | caccGCATCTTGGGCGTGCGCTTGATGTGGGACAG |
| B2 | Guide_54_F | caccGGGGCGTGCGCTTGATGTGGGACAGGCAGAT |
| C2 | Guide_60_F | caccGGCGCTTGATGTGGGACAGGCAGATCAGACA |
| D2 | Guide_66_F | caccGGATGTGGGACAGGCAGATCAGACAGCCCCT |
| E2 | Guide_72_F | caccGGGACAGGCAGATCAGACAGCCCCTGGTGCA |
| F2 | Guide_78_F | caccGGCAGATCAGACAGCCCCTGGTGCAGCCAGC |
| G2 | Guide_84_F | caccGCAGACAGCCCCTGGTGCAGCCAGCTTTCCG |
| H2 | Guide_NT_F | caccGGTAATGCCTGGCTTGTCGACGCATAGTCTG |
| A1 | Guide_0_R | caaccgctgccacacctacgaaggcgacaaagagc |
| B1 | Guide_6_R | caacccaggacgctgccacacctacgaaggcgacc |
| C1 | Guide_12_R | caacttcatcccaggacgctgccacacctacgaac |
| D1 | Guide_18_R | caacaagaagttcatcccaggacgctgccacaccc |
| E1 | Guide_24_R | caacaagatgaagaagttcatcccaggacgctgcc |
| F1 | Guide_30_R | caacacgcccaagatgaagaagttcatcccaggac |
| G1 | Guide_36_R | caacaagcgcacgcccaagatgaagaagttcatcc |
| H1 | Guide_42_R | caaccacatcaagcgcacgcccaagatgaagaagc |
| A2 | Guide_48_R | caacctgtcccacatcaagcgcacgcccaagatgc |
| B2 | Guide_54_R | caacatctgcctgtcccacatcaagcgcacgcccc |
| C2 | Guide_60_R | caactgtctgatctgcctgtcccacatcaagcgcc |
| D2 | Guide_66_R | caacaggggctgtctgatctgcctgtcccacatcc |
| E2 | Guide_72_R | caactgcaccaggggctgtctgatctgcctgtccc |
| F2 | Guide_78_R | caacgctggctgcaccaggggctgtctgatctgcc |
| G2 | Guide_84_R | caaccggaaagctggctgcaccaggggctgtctgc |
| H2 | Guide_NT_R | caaccagactatgcgtcgacaagccaggcattacc |

1. An engineered composition for site-directed base editing comprising a targeting domain and a cytidine deaminase, or catalytic domain thereof.

2. The composition of claim 1, wherein the targeting domain is an oligonucleotide binding domain; or a CRISPR system comprising a CRISPR-Cas protein, or fragment thereof which retains RNA binding ability, and a guide molecule.

3. The composition of claim 1, wherein the cytidine deaminase, or catalytic domain thereof
comprises one or more mutations that increase activity or specificity of the cytidine deaminase relative to wild type;
is fused to a N- or C-terminus of said targeting domain, optionally by a linker, preferably where said linker is (GGGGS)₃₋₁₁ (SEQ ID Nos. 1-9), GSG₅ (SEQ ID No. 10), or LEPGEKPYKCPECGKSFSQSGALTRHQRTHTR (SEQ ID No. 11), or wherein said linker is an XTEN (SEQ ID No. 66);
is inserted into an internal loop of a dead Cas13 protein; or
is linked to an adaptor protein and said guide molecule or a dead Cas13 protein via an aptamer sequence capable of binding to said adaptor protein, preferably wherein said adaptor sequence is selected from the group consisting of MS2, PP7, Qβ, F2, GA, fr, JP501, M12, R17, BZ13, JP34, JP500, KU1, M11, MX1, TW18, VK, SP, FI, ID2, NL95, TW19, AP205, ϕkCb5, ϕCb8r, ϕCb12r, ϕCb23r, 7s and PRR.

4. (canceled)

5. The composition of claim 2, wherein the CRISPR-Cas protein is catalytically inactive.

6. The composition of claim 5, wherein the CRISPR system comprises an RNA-binding protein, preferably Cas13, preferably the Cas13 protein is Cas13a, Cas13b or Cas13c, preferably wherein said Cas13 is a Cas13 listed in any of Tables 1, 2, 3, 4, or 6 or is from a bacterial species listed in any of Tables 1, 2, 3, 4, or 6, preferably wherein said Cas13 protein is Prevotella sp. P5-125 Cas13b, Porphyromas gulae Cas13b, or Riemerella anatipestifer Cas13b; preferably Prevotella sp. P5-125 Cas13b.

7. The composition of claim 6, wherein said Cas13 protein is a Cas13a protein and said Cas13a comprises one or more mutations in one or two HEPN domains in the Cas13a protein, particularly at position R474 and R1046 of Cas13a protein originating from Leptotrichia wadei or amino acid positions corresponding thereto of a Cas13a ortholog, or wherein said Cas13 protein is a Cas13b protein and said Cas13b comprises a mutation in one or more of positions R116, H121, R1177, H1182, preferably R116A, H121A, R1177A, H1182A of Cas13b protein originating from Bergeyella zoohelcum ATCC 43767 or amino acid positions corresponding thereto of a Cas13b ortholog, or wherein said Cas13 protein is a Cas13b protein and said Cas13b comprises a mutation in one or more of positions R128, H133, R1053, H1058, preferably H133 and H1058, preferably H133A and H1058A, of a Cas13b protein originating from Prevotella sp. P5-125 or amino acid positions corresponding thereto of a Cas13b orthologs.

8. The composition of claim 6, wherein said Cas13, preferably Cas13b, is truncated, preferably C-terminally truncated, preferably wherein said Cas13 is a truncated functional variant of the corresponding wild type Cas13, optionally wherein said truncated Cas13b is encoded by nt 1-984 of Prevotella sp. P5-125 Cas13b or the corresponding nt of a Cas13b ortholog or homolog.

9. The composition of claim 3, wherein said guide molecule
comprises a guide sequence is capable of hybridizing with a target RNA sequence
comprising an Cytidine to be edited to form an RNA duplex;
has a length of about 20-53 nt, preferably 25-53 nt, more preferably 29-53 nt or 40-50 nt capable of forming said RNA duplex with said target sequence, and/or wherein the distance between said non-pairing C and the 5′ end of said guide sequence is 20-30 nucleotides; or
comprises more than one mismatch corresponding to different adenosine sites in the target RNA sequence or wherein two guide molecules are used, each comprising a mismatch corresponding to a different adenosine sites in the target RNA sequence.

10. (canceled)

11. (canceled)

12. (canceled)

13. (canceled)

14. (canceled)

15. The composition of claim 1, wherein said targeting domain and optionally said cytidine deaminase or catalytic domain thereof comprise one or more heterologous nuclear export signal(s) (NES(s)) or nuclear localization signal(s) (NLS(s)), preferably an HIV Rev NES or MAPK NES, preferably C-terminal.

16. The composition of claim 1, wherein said target RNA sequence of interest is within a cell, preferably a eukaryotic cell, most preferably a human or non-human animal cell, or plant cell.

17. (canceled)

18. A method of modifying a Cytosine in a target RNA sequence of interest, comprising delivering to said target RNA, the composition according to claim 1.

19. The method of claim 18, wherein the targeting domain comprises a CRISPR system, wherein said guide molecule forms a complex with said CRISPR effector protein and directs said complex to bind said target RNA sequence of interest, wherein said guide sequence is capable of hybridizing with a target sequence comprising said Cytosine to form an RNA duplex; wherein said cytidine deaminase protein or catalytic domain thereof deaminates said Cytosine in said RNA duplex.

20. The method of claim 19, wherein the CRISPR system comprises a Cas13 protein.

21. The method of claim 18, wherein the CRISPR system and the cytidine deaminase, or catalytic domain thereof, are delivered as one or more polynucleotide molecules, as a ribonucleoprotein complex, optionally via particles, vesicles, or one or more viral vectors.

22. (canceled)

23. The method of claim 18, wherein: (a) said Cytosine is outside said target sequence that forms said RNA duplex, wherein said cytidine deaminase protein or catalytic domain thereof deaminates said Cytosine outside said RNA duplex, or (b) said Cytosine is within said target sequence that forms said RNA duplex, wherein said guide sequence comprises a non-pairing Adenine or Uracil at a position corresponding to said Cytosine resulting in a C-A or C-U mismatch in said RNA duplex, and wherein the cytidine deaminase protein or catalytic domain thereof deaminates the Cytosine in the RNA duplex opposite to the non-pairing Adenine or Uracil.

24. An isolated cell comprising the composition of claim 1, or progeny of said modified cell.

25. The cell or progeny thereof of claim 24, wherein said cell is a eukaryotic cell, preferably a human or non-human animal cell, optionally a therapeutic T cell or an antibody-producing B-cell or wherein said cell is a plant cell.

26. A non-human animal or plant comprising said modified cell or progeny thereof of claim 25.

27. (canceled)

28. (canceled)

29. A method of modifying a Cytosine in a target RNA, comprising delivering to said target RNA:
(a) a catalytically inactive Cas13 protein;
(b) a guide molecule which comprises a guide sequence linked to a direct repeat; and
(c) a cytidine deaminase protein or catalytic domain thereof;
wherein said cytidine deaminase protein or catalytic domain thereof is covalently or non-covalently linked to said catalytically inactive Cas13 protein or said guide molecule or is adapted to link thereto after delivery;
wherein said guide molecule forms a complex with said catalytically inactive Cas13 and directs said complex to bind said target RNA, wherein said guide sequence is capable of hybridizing with a target sequence within said target RNA to form an RNA duplex;
wherein: (A) said Cytosine is outside said target sequence that forms said RNA duplex, wherein said cytidine deaminase protein or catalytic domain thereof deaminates said Cytosine outside said RNA duplex, or (B) said Cytosine is within said target sequence that forms said RNA duplex, wherein said guide sequence comprises a non-pairing Adenine or Uracil at a position corresponding to said Cytosine resulting in a C-A or C-U mismatch in said RNA duplex, and wherein the cytidine deaminase protein or catalytic domain thereof deaminates the Cytosine in the RNA duplex opposite to the non-pairing Adenine or Uracil.

30. The method of claim 29, wherein said cytidine deaminase protein or catalytic domain thereof
is fused to N- or C-terminus of said catalytically inactive Cas13 protein;
is fused to a catalytically inactive Cas13 protein by a linker;
is linked to an adaptor protein, and said guide molecule or said catalytically inactive Cas13 protein comprises an aptamer sequence capable of binding to said adaptor protein; or
is inserted into an internal loop of a catalytically inactive Cas13 protein.

31. (canceled)

32. The method of claim 30, wherein said linker is (GGGGS)₃₋₁₁, GSG₅ or LEPGEKPYKCPECGKSFSQSGALTRHQRTHTR (SEQ ID NO. 11).

33. (canceled)

34. The method of claim 30, wherein said adaptor sequence is selected from MS2, PP7, Qβ, F2, GA, fr, JP501, M12, R17, BZ13, JP34, JP500, KU1, M11, MX1, TW18, VK, SP, FI, ID2, NL95, TW19, AP205, ϕCb5, ϕCb8r, ϕCb12r, ϕCb23r, 7s and PRR1.

35. (canceled)

36. The method of claim 29, wherein said catalytically inactive Cas13 protein comprises an HEPN domain comprising one or more mutations;
has at least part of an HEPN domain removed;
is a Cas13a/C2c2, Cas13b, or Cas13c protein;
is obtained from a Cas13a nuclease derived from a bacterial species selected from the group consisting of Leptotrichia shahii, Lachnospiraceae bacterium, Lachnospiraceae bacterium, Clostridium aminophilum, Carnobacterium gallinarum, Paludibacter propionicigenes, Listeria weihenstephanensis, Listeriaceae bacterium, Listeria newyorkensis, Leptotrichia wadei, Rhodobacter capsulatus, Rhodobacter capsulatus, Rhodobacter capsulatus, Leptotrichia wadei, or Listeria seeligeri;
obtained from a Cas13b nuclease derived from a bacterial species selected from the group consisting of Porphyromonas gulae, Prevotella sp., Porphyromonas gingivalis, Bacteroides pyogenes, Riemerella anatipestifer, Bergeyella zoohelcum, Prevotella intermedia, Prevotella buccae, Alistipes sp., Prevotella aurantiaca, Myroides odoratimimus, Capnocytophaga canimorsus, Flavobacterium branchiophilum, and Flavobacterium columnare; or
has been modified to and recognizes an altered PAM sequence.

37. (canceled)

38. (canceled)

39. (canceled)

40. (canceled)

41. (canceled)

42. The method of claim 29, wherein said guide molecule binds to said catalytically inactive Cas13 protein and is capable of forming said RNA duplex of about 15-30 nt with said target sequence;
binds to said catalytically inactive Cas13 protein and is capable of forming said RNA duplex of more than 30 nt with said target sequence;
comprises at least one further non-pairing nucleotide with said target sequence, adjacent to said non-pairing Adenine or Uracil; or
comprises a stretch of three to five consecutive non-pairing nucleotides with said target sequence.

43. (canceled)

44. (canceled)

45. (canceled)

46. The method of claim 29, wherein said cytidine deaminase protein or catalytic domain thereof is
a human, rat or lamprey cytidine deaminase protein or catalytic domain thereof;
an apolipoprotein B mRNA-editing complex (APOBEC) family deaminase, an activation-induced deaminase (AID), or a cytidine deaminase 1 (CDA1);
an APOBEC1 deaminase comprising one or more mutations corresponding to W90A, W90Y, R118A, H121R, H122R, R126A, R126E, or R132E in rat APOBEC1, or an APOBEC3G deaminase comprising one or more mutations corresponding to W285A, W285Y, R313A, D316R, D317R, R320A, R320E, or R326E in human APOBEC3G; or
is delivered together with a uracil glycosylase inhibitor (UGI), where said UGI is covalently linked to said cytidine deaminase protein or catalytic domain thereof and/or said catalytically inactive Cas13 protein.

47. (canceled)

48. (canceled)

49. The method of claim 29, wherein said catalytically inactive Cas13 protein and optionally said cytidine deaminase protein or catalytic domain thereof comprise one or more heterologous nuclear export signal(s) (NES(s)).

50. (canceled)

51. The method of claim 29, wherein said method comprises, determining said target sequence of interest and selecting a cytidine deaminase protein or catalytic domain thereof which most efficiently deaminates said Cytosine present in said target sequence.

52. The method of claim 29, wherein said target RNA is within a cell, or within an animal, a plant, or comprised in a DNA molecule in vitro.

53. The method of claim 52, wherein said cell is a eukaryotic cell, a non-human animal cell, a human cell, or a plant cell.

54. (canceled)

55. (canceled)

56. (canceled)

57. (canceled)

58. (canceled)

59. (canceled)

60. The method of claim 29, wherein said components (a), (b) and (c) are delivered to the cell as a ribonucleoprotein complex or as one or more polynucleotide molecules.

61. (canceled)

62. The method of claim 60, wherein said one or more polynucleotide molecules
comprise one or more mRNA molecules encoding components (a) and/or (c);
are comprised within one or more vectors; or
comprise one or more regulatory elements operably configured to express said catalytically inactive Cas13 protein, said guide molecule, and said cytidine deaminase protein or catalytic domain thereof, optionally wherein said one or more regulatory elements comprise inducible promoters.

63. (canceled)

64. (canceled)

65. The method of claim 60, wherein said one or more polynucleotide molecules or said ribonucleoprotein complex are delivered via particles, vesicles, or one or more viral vectors.

66. The method of claim 65, wherein said particles comprise a lipid, a sugar, a metal, a protein or a lipid nanoparticle.

67. (canceled)

68. The method of claim 65, wherein said vesicles comprise exosomes or liposomes.

69. The method of claim 65, wherein said one or more viral vectors comprise one or more of adenovirus, one or more lentivirus or one or more adeno-associated virus.

70. The method of claim 29, which is a method of modifying a cell, a cell line or an organism by manipulation of one or more target sequences at genomic loci of interest.

71. The method of claim 70, wherein deamination of said Cytosine at said target RNA remedies a disease caused by a T(U)→C or A→G point mutation or pathogenic SNP or inactivates a gene transcript.

72. (canceled)

73. The cell of claim 24, wherein said cell comprises a Uracil or a Thymine in replace of said Cytosine in said target RNA compared to a corresponding cell not comprising said composition.

74. (canceled)

75. (canceled)

76. (canceled)

77. (canceled)

78. (canceled)

79. (canceled)

80. (canceled)

81. (canceled)

82. A method for cell therapy, comprising administering to a patient in need thereof said modified cell of claim 73, wherein presence of said modified cell remedies a disease in said patient.

The application's sequence listing, which the Patent Office published only in electronic form, follows.

SEQUENCE LISTING (312 sequences)

SEQ ID NO: 1 - protein, 15 aa, Artificial Sequence
  Synthetic
GGGGSGGGGSGGGGS

SEQ ID NO: 2 - protein, 20 aa, Artificial Sequence
  Synthetic
GGGGSGGGGSGGGGSGGGGS

SEQ ID NO: 3 - protein, 25 aa, Artificial Sequence
  Synthetic
GGGGSGGGGSGGGGSGGGGSGGGGS

SEQ ID NO: 4 - protein, 30 aa, Artificial Sequence
  Synthetic
GGGGSGGGGSGGGGSGGGGSGGGGSGGGGS

SEQ ID NO: 5 - protein, 35 aa, Artificial Sequence
  Synthetic
GGGGSGGGGSGGGGSGGGGSGGGGSGGGGSGGGGS

SEQ ID NO: 6 - protein, 40 aa, Artificial Sequence
  Synthetic
GGGGSGGGGSGGGGSGGGGSGGGGSGGGGSGGGGSGGGGS

SEQ ID NO: 7 - protein, 45 aa, Artificial Sequence
  Synthetic
GGGGSGGGGSGGGGSGGGGSGGGGSGGGGSGGGGSGGGGSGGGGS

SEQ ID NO: 8 - protein, 50 aa, Artificial Sequence
  Synthetic
GGGGSGGGGSGGGGSGGGGSGGGGSGGGGSGGGGSGGGGSGGGGSGGGGS

SEQ ID NO: 9 - protein, 55 aa, Artificial Sequence
  Synthetic
GGGGSGGGGSGGGGSGGGGSGGGGSGGGGSGGGGSGGGGSGGGGSGGGGSGGGGS

SEQ ID NO: 10 - protein, 15 aa, Artificial Sequence
  Synthetic
GSGGSGGSGGSGGSG

SEQ ID NO: 11 - protein, 32 aa, Artificial Sequence
  Synthetic
LEPGEKPYKCPECGKSFSQSGALTRHQRTHTR

SEQ ID NO: 12 - DNA, 132 bp, Cypridina sp.
agcagttccacacactcgcttctggaacgtctgaggttatcaataagctcctagtccagacgccgccaccacgaagaccttaattcttgccgttgcattagtctactgcgccactgttcattgccaggactg

SEQ ID NO: 13 - DNA, 132 bp, Cyprindina sp.
tcgtcaaggtgtgtgagcgaagaccttgcagactccaatagttattcgaggatcaggtctgcggcggtggtgcttctggaattaagaacggcaacgtaatcagatgacgcggtgacaagtaacggtcctgac

SEQ ID NO: 14 - protein, 21 aa, Cyprindina sp.
TKTLILAVALVYCATVHCQDC

SEQ ID NO: 15 - DNA, 36 bp, Cyprindina sp.
tggaggtgctcaaagagatggaagccaatgcccgga

SEQ ID NO: 16 - DNA, 34 bp, Artificial Sequence
  Synthetic
agagatggaagccaatgcccggaaagctggctgc

SEQ ID NO: 17 - DNA, 36 bp, Artificial Sequence
  Synthetic
  misc_feature (1)..(1): n is a, c, g, or t
nggaggtgctcaaagagatggaagccaatgcccgga

SEQ ID NO: 18 - DNA, 36 bp, Artificial Sequence
  Synthetic
  misc_feature (2)..(2): n is a, c, g, or t
tngaggtgctcaaagagatggaagccaatgcccgga

SEQ ID NO: 19 - DNA, 36 bp, Artificial Sequence
  Synthetic
  misc_feature (3)..(3): n is a, c, g, or t
tgnaggtgctcaaagagatggaagccaatgcccgga

SEQ ID NO: 20 - DNA, 36 bp, Artificial Sequence
  Synthetic
  misc_feature (4)..(4): n is a, c, g, or t
tggnggtgctcaaagagatggaagccaatgcccgga

SEQ ID NO: 21 - DNA, 36 bp, Artificial Sequence
  Synthetic
  misc_feature (4)..(4): n is a, c, g, or t
  misc_feature (36)..(36): n is a, c, g, or t
tggnggtgctcaaagagatggaagccaatgcccggn

SEQ ID NO: 22 - DNA, 34 bp, Artificial Sequence
  Synthetic
  misc_feature (1)..(1): n is a, c, g, or t
ngagatggaagccaatgcccggaaagctggctgc

SEQ ID NO: 23 - DNA, 34 bp, Artificial Sequence
  Synthetic
  misc_feature (2)..(2): n is a, c, g, or t
anagatggaagccaatgcccggaaagctggctgc

SEQ ID NO: 24 - DNA, 34 bp, Artificial Sequence
  Synthetic
  misc_feature (3)..(3): n is a, c, g, or t
agngatggaagccaatgcccggaaagctggctgc

SEQ ID NO: 25 - DNA, 34 bp, Artificial Sequence
  Synthetic
  misc_feature (4)..(4): n is a, c, g, or t
aganatggaagccaatgcccggaaagctggctgc

SEQ ID NO: 26 - DNA, 34 bp, Artificial Sequence
  Synthetic
  misc_feature (34)..(34): n is a, c, g, or t
agagatggaagccaatgcccggaaagctggctgn

SEQ ID NO: 27 - DNA, 36 bp, Artificial Sequence
  Synthetic
  misc_feature (1)..(2): n is a, c, g, or t
nngaggtgctcaaagagatggaagccaatgcccgga

SEQ ID NO: 28 - DNA, 36 bp, Artificial Sequence
  Synthetic
  misc_feature (1)..(1): n is a, c, g, or t
  misc_feature (3)..(3): n is a, c, g, or t
ngnaggtgctcaaagagatggaagccaatgcccgga

SEQ ID NO: 29 - DNA, 36 bp, Artificial Sequence
  Synthetic
  misc_feature (1)..(1): n is a, c, g, or t
  misc_feature (4)..(4): n is a, c, g, or t
nggnggtgctcaaagagatggaagccaatgcccgga

SEQ ID NO: 30 - DNA, 36 bp, Artificial Sequence
  Synthetic
  misc_feature (1)..(1): n is a, c, g, or t
  misc_feature (5)..(5): n is a, c, g, or t
nggangtgctcaaagagatggaagccaatgcccgga

SEQ ID NO: 31 - DNA, 36 bp, Artificial Sequence
  Synthetic
  misc_feature (35)..(36): n is a, c, g, or t
tggaggtgctcaaagagatggaagccaatgcccgnn

SEQ ID NO: 32 - DNA, 34 bp, Artificial Sequence
  Synthetic
  misc_feature (1)..(2): n is a, c, g, or t
nnagatggaagccaatgcccggaaagctggctgc

SEQ ID NO: 33 - DNA, 34 bp, Artificial Sequence
  Synthetic
  misc_feature (1)..(1): n is a, c, g, or t
  misc_feature (3)..(3): n is a, c, g, or t
ngngatggaagccaatgcccggaaagctggctgc

SEQ ID NO: 34 - DNA, 34 bp, Artificial Sequence
  Synthetic
  misc_feature (1)..(1): n is a, c, g, or t
  misc_feature (4)..(4): n is a, c, g, or t
nganatggaagccaatgcccggaaagctggctgc

SEQ ID NO: 35 - DNA, 34 bp, Artificial Sequence
  Synthetic
  misc_feature (1)..(1): n is a, c, g, or t
  misc_feature (5)..(5): n is a, c, g, or t
ngagntggaagccaatgcccggaaagctggctgc

SEQ ID NO: 36 - DNA, 34 bp, Artificial Sequence
  Synthetic
  misc_feature (33)..(34): n is a, c, g, or t
agagatggaagccaatgcccggaaagctggctnn

SEQ ID NO: 37 - protein, 9 aa, Artificial Sequence
  Synthetic
GGSGGSGGS

SEQ ID NO: 38 - protein, 60 aa, Artificial Sequence
  Synthetic
GGGGSGGGGSGGGGSGGGGSGGGGSGGGGSGGGGSGGGGSGGGGSGGGGSGGGGSGGGGS

SEQ ID NO: 39 - protein, 5 aa, Artificial Sequence
  Synthetic
GGGGS

SEQ ID NO: 40 - protein, 10 aa, Artificial Sequence
  Synthetic
GGGGSGGGGS

SEQ ID NO: 41 - protein, 20 aa, Artificial Sequence
  Synthetic
PKKKRKVEASSPKKRKVEAS

SEQ ID NO: 42 - protein, 229 aa, Rattus sp. [sequence omitted]

SEQ ID NO: 43 - protein, 236 aa, Homo sapiens
MTSEKGPSTGDPTLRRRIEPWEFDVFYDPRELRKEACLLYEIKWGMSRKIWRSSGKNTTNHVEVNFIKKFTSERDFHPSMSCSITWFLSWSPCWECSQAIREFLSRHPGVTLVIYVARLFWHMDQQNRQGLRDLVNSGVTIQIMRASEYYHCWRNFVNYPPGDEAHWPQYPPLWMMLYALELHCIILSLPPCLKISRRWQNHLTFFRLHLQNCHYQTIPPHILLATGLIHPSVAWR

SEQ ID NO: 44 - protein, 325 aa, Homo sapiens
MELKYHPEMRFFHWFSKWRKLHRDQEYEVTWYISWSPCTKCTRDMATFLAEDPKVTLTIFVARLYYFWDPDYQEALRSLCQKRDGPRATMKIMNYDEFQHCWSKFVYSQRELFEPWNNLPKYYILLHIMLGEILRHSMDPPTFTFNFNNEPWVRGRHETYLCYEVERMHNDTWVLLNQRRGFLCNQAPHKHGFLEGRHAELCFLDVIPFWKLDLDQDYRVTCFTSWSPCFSCAQEMAKFISKNKHVSLCIFTARIYDDQGRCQEGLRTLAEAGAKISIMTYSEFKHCWDTFVDHQGCPFQPWDGLDEHSQDLSGRLRAILQNQEN

SEQ ID NO: 45 - protein, 208 aa, Petromyzon marinus
MTDAEYVRIHEKLDIYTFKKQFFNNKKSVSHRCYVLFELKRRGERRACFWGYAVNKPQSGTERGIHAEIFSIRKVEEYLRDNPGQFTINWYSSWSPCADCAEKILEWYNQELRGNGHTLKIWACKLYYEKNARNQIGLWNLRDNGVGLNVMVSEHYQCCRKIFIQSSHNQLNENRWLEKTLKRAEKRRSELSIMIQVKILHTTKSPAV

SEQ ID NO: 46 - protein, 200 aa, Homo sapiens
MDSLLMNRRKFLYQFKNVRWAKGRRETYLCYVVKRRDSATSFSLDFGYLRNKNGCHVELLFLRYISDWDLDPGRCYRVTWFTSWSPCYDCARHVADFLRGNPYLSLRIFTARLYFCEDRKAEPEGLRRLHRAGVQIAIMTFKDYFYCWNTFVENHERTFKAWEGLHENSVRLSRQLRRILLPLYEVDDLRDAFRTLGLLD

SEQ ID NO: 47 - protein, 181 aa, Homo sapiens
MDSLLMNRRKFLYQFKNVRWAKGRRETYLCYVVKRRDSATSFSLDFGYLRNKNGCHVELLFLRYISDWDLDPGRCYRVTWFTSWSPCYDCARHVADFLRGNPNLSLRIFTARLYFCEDRKAEPEGLRRLHRAGVQIAIMTFKDYFYCWNTFVENHERTFKAWEGLHENSVRLSRQLRRILL

SEQ ID NO: 48 - protein, 84 aa, Escherica coli
MTNLSDIIEKETGKQLVIQESILMLPEEVEEVIGNKPESDILVHTAYDESTDENVMLLTSDAPEYKPWALVIQDSNGENKIKML

SEQ ID NO: 49 - protein, 7 aa, Simian virus 40
PKKKRKV

SEQ ID NO: 50 - protein, 10 aa, Artificial Sequence
  Synthetic
PKKKRKVEAS

SEQ ID NO: 51 - protein, 16 aa, Artificial Sequence
  Synthetic
KRPAATKKAGQAKKKK

SEQ ID NO: 52 - protein, 9 aa, Artificial Sequence
  Synthetic
PAAKRVKLD

SEQ ID NO: 53 - protein, 11 aa, Artificial Sequence
  Synthetic
RQRRNELKRSP

SEQ ID NO: 54 - protein, 38 aa, Artificial Sequence
  Synthetic
NQSSNFGPMKGGNFGGRSSGPYGGGGQYFAKPRNQGGY

SEQ ID NO: 55 - protein, 42 aa, Artificial Sequence
  Synthetic
RMRIZFKNKGKDTAELRRRRVEVSVELRKAKKDEQILKRRNV

SEQ ID NO: 56 - protein, 8 aa, Artificial Sequence
  Synthetic
VSRKRPRP

SEQ ID NO: 57 - protein, 8 aa, Artificial Sequencen
  Synthetic
PPKKARED

SEQ ID NO: 58 - protein, 8 aa, Homo sapiens
PQPKKKPL

SEQ ID NO: 59 - protein, 12 aa, Mus
SALIKKKKKMAP

SEQ ID NO: 60 - protein, 5 aa, Influenza virus
DRLRR

SEQ ID NO: 61 - protein, 7 aa, Influenza virus
PKQKKRK

SEQ ID NO: 62 - protein, 10 aa, Hepatitis virus
RKLKKKIKKL

SEQ ID NO: 63 - protein, 10 aa, Mus
REKKKFLKRR

SEQ ID NO: 64 - protein, 20 aa, Homo sapiens
KRKGDEVDGVDEVAKKKSKK

SEQ ID NO: 65 - protein, 17 aa, Homo sapiens
RKCLQAGMNLEARKTKK

SEQ ID NO: 66 - protein, 4 aa, Artificial Sequence
  Synthetic
  misc_feature (1)..(1): Xaa can be any naturally occurring amino acid
XTEN

SEQ ID NO: 67 - protein, 1340 aa, Lachnospiracea bacterium
MQISKVNHKHVAVGQKDRERITGFIYNDPVGDEKSLEDVVAKRANDTKVLFNVFNTKDLYDSQESDKSEKDKEIISKGAKFVAKSFNSAITILKKQNKIYSTLTSQQVIKELKDKFGGARIYDDDIEEALTETLKKSFRKENVRNSIKVLIENAAGIRSSLSKDEEELIQEYFVKQLVEEYTKTKLQKNVVKSIKNQNMVIQPDSDSQVLSLSESRREKQSSAVSSDTLVNCKEKDVLKAFLTDYAVLDEDERNSLLWKLRNLVNLYFYGSESIRDYSYTKEKSVWKEHDEQKANKTLFIDEICHITKIGKNGKEQKVLDYEENRSRCRKQNINYYRSALNYAKNNTSGIFENEDSNHFWIHLIENEVERLYNGIENGEEFKFETGYISEKVWKAVINHLSIKYIALGKAVYNYAMKELSSPGDIEPGKIDDSYINGITSFDYEIIKAEESLQRDISMNVVFATNYLACATVDTDKDFLLFSKEDIRSCTKKDGNLCKNIMQFWGGYSTWKNFCEEYLKDDKDALELLYSLKSMLYSMRNSSFHFSTENVDNGSWDTELIGKLFEEDCNRAARIEKEKFYNNNLHMFYSSSLLEKVLERLYSSHHERASQVPSFNRVFVRKNFPSSLSEQRITPKFTDSKDEQIWQSAVYYLCKEIYYNDFLQSKEAYKLFREGVKNLDKNDINNQKAADSFKQAVVYYGKAIGNATLSQVCQAIMTEYNRQNNDGLKKKSAYAEKQNSNKYKHYPLFLKQVLQSAFWEYLDENKEIYGFISAQIHKSNVEIKAEDFIANYSSQQYKKLVDKVKKTPELQKWYTLGRLINPRQANQFLGSIRNYVQFVKDIQRRAKENGNPIRNYYEVLESDSIIKILEMCTKLNGTTSNDIHDYFRDEDEYAEYISQFVNFGDVHSGAALNAFCNSESEGKKNGIYYDGINPIVNRNWVLCKLYGSPDLISKIISRVNENMIHDFHKQEDLIREYQIKGICSNKKEQQDLRTFQVLKNRVELRDIVEYSEIINELYGQLIKWCYLRERDLMYFQLGFHYLCLNNASSKEADYIKINVDDRNISGAILYQIAAMYINGLPVYYKKDDMYVALKSGKKASDELNSNEQTSKKINYFLKYGNNILGDKKDQLYLAGLELFENVAEHENIIIFRNEIDHFHYFYDRDRSMLDLYSEVFDRFFTYDMKLRKNVVNMLYNILLDHNIVSSFVFETGEKKVGRGDSEVIKPSAKIRLRANNGVSSDVFTYKVGSKDELKIATLPAKNEEFLLNVARLIYYPDMEAVSENMVREGVVKVEKSNDKKGKISRGSNTRSSNQSKYNNKSKNRMNYSMGSIFEKMDLKFD

SEQ ID NO: 68 - protein, 1437 aa, Lachnospiracea bacterium
MKISKVREENRGAKLTVNAKTAVVSENRSQEGILYNDPSRYGKSRKNDEDRDRYIESRLKSSGKLYRIFNEDKNKRETDELQWFLSEIVKKINRRNGLVLSDMLSVDDRAFEKAFEKYAELSYTNRRNKVSGSPAFETCGVDAATAERLKGIISETNFINRIKNNIDNKVSEDIIDRIIAKYLKKSLCRERVKRGLKKLLMNAFDLPYSDPDIDVQRDFIDYVLEDFYHVRAKSQVSRSIKNMNMPVQPEGDGKFAITVSKGGTESGNKRSAEKEAFKKFLSDYASLDERVRDDMLRRMRRLVVLYFYGSDDSKLSDVNEKFDVWEDHAARRVDNREFIKLPLENKLANGKTDKDAERIRKNTVKELYRNQNIGCYRQAVKAVEEDNNGRYFDDKMLNMFFIHRIEYGVEKIYANLKQVTEFKARTGYLSEKIWKDLINYISIKYIAMGKAVYNYAMDELNASDKKEIELGKISEEYLSGISSFDYELIKAEEMLQRETAVYVAFAARHLSSQTVELDSENSDFLLLKPKGTMDKNDKNKLASNNILNFLKDKETLRDTILQYFGGHSLWTDFPFDKYLAGGKDDVDFLTDLKDVIYSMRNDSFHYATENHNNGKWNKELISAMFEHETERMTVVMKDKFYSNNLPMFYKNDDLKKLLIDLYKDNVERASQVPSFNKVFVRKNFPALVRDKDNLGIELDLKADADKGENELKFYNALYYMFKEIYYNAFLNDKNVRERFITKATKVADNYDRNKERNLKDRIKSAGSDEKKKLREQLQNYIAENDFGQRIKNIVQVNPDYTLAQICQLIMTEYNQQNNGCMQKKSAARKDINKDSYQHYKMLLLVNLRKAFLEFIKENYAFVLKPYKHDLCDKADFVPDFAKYVKPYAGLISRVAGSSELQKWYIVSRFLSPAQANHMLGFLHSYKQYVWDIYRRASETGTEINHSIAEDKIAGVDITDVDAVIDLSVKLCGTISSEISDYFKDDEVYAEYISSYLDFEYDGGNYKDSLNRFCNSDAVNDQKVALYYDGEHPKLNRNIILSKLYGERRFLEKITDRVSRSDIVEYYKLKKETSQYQTKGIFDSEDEQKNIKKFQEMKNIVEFRDLMDYSEIADELQGQLINWIYLRERDLMNFQLGYHYACLNNDSNKQATYVTLDYQGKKNRKINGAILYQICAMYINGLPLYYVDKDSSEWTVSDGKESTGAKIGEFYRYAKSFENTSDCYASGLEIFENISEHDNITELRNYIEHFRYYSSFDRSFLGIYSEVFDRFFTYDLKYRKNVPTILYNILLQHFVNVRFEFVSGKKMIGIDKKDRKIAKEKECARITIREKNGVYSEQFTYKLKNGTVYVDARDKRYLQSIIRLLFYPEKVNMDEMIEVKEKKKPSDNNTGKGYSKRDRQQDRKEYDKYKEKKKKEGNFLSGMGGNINWDEINAQLKN

SEQ ID NO: 69 - protein, 1385 aa, Clostridium aminophilum
MKFSKVDHTRSAVGIQKATDSVHGMLYTDPKKQEVNDLDKRFDQLNVKAKRLYNVFNQSKAEEDDDEKRFGKVVKKLNRELKDLLFHREVSRYNSIGNAKYNYYGIKSNPEEIVSNLGMVESLKGERDPQKVISKLLLYYLRKGLKPGTDGLRMILEASCGLRKLSGDEKELKVFLQTLDEDFEKKTFKKNLIRSIENQNMAVQPSNEGDPIIGITQGRFNSQKNEEKSAIERMMSMYADLNEDHREDVLRKLRRLNVLYFNVDTEKTEEPTLPGEVDTNPVFEVWHDHEKGKENDRQFATFAKILTEDRETRKKEKLAVKEALNDLKSAIRDHNIMAYRCSIKVTEQDKDGLFFEDQRINRFWIHHIESAVERILASINPEKLYKLRIGYLGEKVWKDLLNYLSIKYIAVGKAVFHFAMEDLGKTGQDIELGKLSNSVSGGLTSFDYEQIRADETLQRQLSVEVAFAANNLFRAVVGQTGKKIEQSKSEENEEDFLLWKAEKIAESIKKEGEGNTLKSILQFFGGASSWDLNHFCAAYGNESSALGYETKFADDLRKAIYSLRNETFHFTTLNKGSFDWNAKLIGDMFSHEAATGIAVERTRFYSNNLPMFYRESDLKRIMDHLYNTYHPRASQVPSFNSVFVRKNFRLFLSNTLNTNTSFDTEVYQKWESGVYYLFKEIYYNSFLPSGDAHHLFFEGLRRIRKEADNLPIVGKEAKKRNAVQDFGRRCDELKNLSLSAICQMIMTEYNEQNNGNRKVKSTREDKRKPDIFQHYKMLLLRTLQEAFAIYIRREEFKFIFDLPKTLYVMKPVEEFLPNWKSGMFDSLVERVKQSPDLQRWYVLCKFLNGRLLNQLSGVIRSYIQFAGDIQRRAKANHNRLYMDNTQRVEYYSNVLEVVDFCIKGTSRFSNVFSDYFRDEDAYADYLDNYLQFKDEKIAEVSSFAALKTFCNEEEVKAGIYMDGENPVMQRNIVMAKLFGPDEVLKNVVPKVTREEIEEYYQLEKQIAPYRQNGYCKSEEDQKKLLRFQRIKNRVEFQTITEFSEIINELLGQLISWSFLRERDLLYFQLGFHYLCLHNDTEKPAEYKEISREDGTVIRNAILHQVAAMYVGGLPVYTLADKKLAAFEKGEADCKLSISKDTAGAGKKIKDFFRYSKYVLIKDRMLTDQNQKYTIYLAGLELFENTDEHDNITDVRKYVDHFKYYATSDENAMSILDLYSEIHDRFFTYDMKYQKNVANMLENILLRHFVLIRPEFFTGSKKVGEGKKITCKARAQIEIAENGMRSEDFTYKLSDGKKNISTCMIAARDQKYLNTVARLLYYPHEAKKSIVDTREKKNNKKTNRGDGTFNKQKGTARKEKDNGPREFNDTGFSNTPFAGFDPFRNS

SEQ ID NO: 70 - protein, 1175 aa, Carnobacterium gallinarum
MRITKVKIKLDNKLYQVTMQKEEKYGTLKLNEESRKSTAEILRLKKASFNKSFHSKTINSQKENKNATIKKNGDYISQIFEKLVGVDTNKNIRKPKMSLTDLKDLPKKDLALFIKRKFKNDDIVEIKNLDLISLFYNALQKVPGEHFTDESWADFCQEMMPYREYKNKFIERKIILLANSIEQNKGFSINPETFSKRKRVLHQWAIEVQERGDFSILDEKLSKLAEIYNFKKMCKRVQDELNDLEKSMKKGKNPEKEKEAYKKQKNFKIKTIWKDYPYKTHIGLIEKIKENEELNQFNIEIGKYFEHYFPIKKERCTEDEPYYLNSETIATTVNYQLKNALISYLMQIGKYKQFGLENQVLDSKKLQEIGIYEGFQTKFMDACVFATSSLKNIIEPMRSGDILGKREFKEAIATSSFVNYHHFFPYFPFELKGMKDRESELIPFGEQTEAKQMQNIWALRGSVQQIRNEIFHSFDKNQKFNLPQLDKSNFEFDASENSTGKSQSYIETDYKFLFEAEKNQLEQFFIERIKSSGALEYYPLKSLEKLFAKKEMKFSLGSQVVAFAPSYKKLVKKGHSYQTATEGTANYLGLSYYNRYELKEESFQAQYYLLKLIYQYVFLPNFSQGNSPAFRETVKAILRINKDEARKKMKKNKKFLRKYAFEQVREMEFKETPDQYMSYLQSEMREEKVRKAEKNDKGFEKNITMNFEKLLMQIFVKGFDVFLTTFAGKELLLSSEEKVIKETEISLSKKINEREKTLKASIQVEHQLVATNSAISYWLFCKLLDSRHLNELRNEMIKFKQSRIKFNHTQHAELIQNLLPIVELTILSNDYDEKNDSQNVDVSAYFEDKSLYETAPYVQTDDRTRVSFRPILKLEKYHTKSLIEALLKDNPQFRVAATDIQEWMHKREEIGELVEKRKNLHTEWAEGQQTLGAEKREEYRDYCKKIDRFNWKANKVTLTYLSQLHYLITDLLGRMVGFSALFERDLVYFSRSFSELGGETYHISDYKNLSGVLRLNAEVKPIKIKNIKVIDNEENPYKGNEPEVKPFLDRLHAYLENVIGIKAVHGKIRNQTAHLSVLQLELSMIESMNNLRDLMAYDRKLKNAVTKSMIKILDKHGMILKLKIDENHKNFEIESLIPKEIIHLKDKAIKTNQVSEEYCQLVLALLTTNPGNQLN

SEQ ID NO: 71 - protein, 1164 aa, Carnobacterium gallinarum
MRMTKVKINGSPVSMNRSKLNGHLVWNGTTNTVNILTKKEQSFAASFLNKTLVKADQVKGYKVLAENIFIIFEQLEKSNSEKPSVYLNNIRRLKEAGLKRFFKSKYHEEIKYTSEKNQSVPTKLNLIPLFFNAVDRIQEDKFDEKNWSYFCKEMSPYLDYKKSYLNRKKEILANSIQQNRGFSMPTAEEPNLLSKRKQLFQQWAMKFQESPLIQQNNFAVEQFNKEFANKINELAAVYNVDELCTAITEKLMNFDKDKSNKTRNFEIKKLWKQHPHNKDKALIKLFNQEGNEALNQFNIELGKYFEHYFPKTGKKESAESYYLNPQTIIKTVGYQLRNAFVQYLLQVGKLHQYNKGVLDSQTLQEIGMYEGFQTKFMDACVFASSSLRNIIQATTNEDILTREKFKKELEKNVELKHDLFFKTEIVEERDENPAKKIAMTPNELDLWAIRGAVQRVRNQIFHQQINKRHEPNQLKVGSFENGDLGNVSYQKTIYQKLFDAEIKDIEIYFAEKIKSSGALEQYSMKDLEKLFSNKELTLSLGGQVVAFAPSYKKLYKQGYFYQNEKTIELEQFTDYDFSNDVFKANYYLIKLIYHYVFLPQFSQANNKLFKDTVHYVIQQNKELNTTEKDKKNNKKIRKYAFEQVKLMKNESPEKYMQYLQREMQEERTIKEAKKTNEEKPNYNFEKLLIQIFIKGFDTFLRNFDLNLNPAEELVGTVKEKAEGLRKRKERIAKILNVDEQIKTGDEEIAFWIFAKLLDARHLSELRNEMIKFKQSSVKKGLIKNGDLIEQMQPILELCILSNDSESMEKESFDKIEVFLEKVELAKNEPYMQEDKLTPVKFRFMKQLEKYQTRNFIENLVIENPEFKVSEKIVLNWHEEKEKIADLVDKRTKLHEEWASKAREIEEYNEKIKKNKSKKLDKPAEFAKFAEYKIICEAIENFNRLDHKVRLTYLKNLHYLMIDLMGRMVGFSVLFERDFVYMGRSYSALKKQSIYLNDYDTFANIRDWEVNENKHLFGTSSSDLTFQETAEFKNLKKPMENQLKALLGVTNHSFEIRNNIAHLHVLRNDGKGEGVSLLSCMNDLRKLMSYDRKLKNAVTKAIIKILDKHGMILKLTNNDHTKPFEIESLKPKKIIHLEKSNHSFPMDQVSQEYCDLVKKMLVFTN

SEQ ID NO: 72 - protein, 1154 aa, Paludibacter propionicigenes
MRVSKVKVKDGGKDKMVLVHRKTTGAQLVYSGQPVSNETSNILPEKKRQSFDLSTLNKTIIKFDTAKKQKLNVDQYKIVEKIFKYPKQELPKQIKAEEILPFLNHKFQEPVKYWKNGKEESFNLTLLIVEAVQAQDKRKLQPYYDWKTWYIQTKSDLLKKSIENNRIDLTENLSKRKKALLAWETEFTASGSIDLTHYHKVYMTDVLCKMLQDVKPLTDDKGKINTNAYHRGLKKALQNHQPAIFGTREVPNEANRADNQLSIYHLEVVKYLEHYFPIKTSKRRNTADDIAHYLKAQTLKTTIEKQLVNAIRANIIQQGKTNHHELKADTTSNDLIRIKTNEAFVLNLTGTCAFAANNIRNMVDNEQTNDILGKGDFIKSLLKDNTNSQLYSFFFGEGLSTNKAEKETQLWGIRGAVQQIRNNVNHYKKDALKTVFNISNFENPTITDPKQQTNYADTIYKARFINELEKIPEAFAQQLKTGGAVSYYTIENLKSLLTTFQFSLCRSTIPFAPGFKKVFNGGINYQNAKQDESFYELMLEQYLRKENFAEESYNARYFMLKLIYNNLFLPGFTTDRKAFADSVGFVQMQNKKQAEKVNPRKKEAYAFEAVRPMTAADSIADYMAYVQSELMQEQNKKEEKVAEETRINFEKFVLQVFIKGFDSFLRAKEFDFVQMPQPQLTATASNQQKADKLNQLEASITADCKLTPQYAKADDATHIAFYVFCKLLDAAHLSNLRNELIKFRESVNEFKFHHLLEIIEICLLSADVVPTDYRDLYSSEADCLARLRPFIEQGADITNWSDLFVQSDKHSPVIHANIELSVKYGTTKLLEQIINKDTQFKTTEANFTAWNTAQKSIEQLIKQREDHHEQWVKAKNADDKEKQERKREKSNFAQKFIEKHGDDYLDICDYINTYNWLDNKMHFVHLNRLHGLTIELLGRMAGFVALFDRDFQFFDEQQIADEFKLHGFVNLHSIDKKLNEVPTKKIKEIYDIRNKIIQINGNKINESVRANLIQFISSKRNYYNNAFLHVSNDEIKEKQMYDIRNHIAHFNYLTKDAADFSLIDLINELRELLHYDRKLKNAVSKAFIDLFDKHGMILKLKLNADHKLKVESLEPKKIYHLGSSAKDKPEYQYCTNQVMMAYCNMCRSLLEMKK

SEQ ID NO: 73 - protein, 970 aa, Listeria weihenstephanensis
MLALLHQEVPSQKLHNLKSLNTESLTKLFKPKFQNMISYPPSKGAEHVQFCLTDIAVPAIRDLDEIKPDWGIFFEKLKPYTDWAESYIHYKQTTIQKSIEQNKIQSPDSPRKLVLQKYVTAFLNGEPLGLDLVAKKYKLADLAESFKVVDLNEDKSANYKIKACLQQHQRNILDELKEDPELNQYGIEVKKYIQRYFPIKRAPNRSKHARADFLKKELIESTVEQQFKNAVYHYVLEQGKMEAYELTDPKTKDLQDIRSGEAFSFKFINACAFASNNLKMILNPECEKDILGKGDFKKNLPNSTTQSDVVKKMIPFFSDEIQNVNFDEAIWAIRGSIQQIRNEVYHCKKHSWKSILKIKGFEFEPNNMKYTDSDMQKLMDKDIAKIPDFIEEKLKSSGIIRFYSHDKLQSIWEMKQGFSLLTTNAPFVPSFKRVYAKGHDYQTSKNRYYDLGLTTFDILEYGEEDFRARYFLTKLVYYQQFMPWFTADNNAFRDAANFVLRLNKNRQQDAKAFINIREVEEGEMPRDYMGYVQGQIAIHEDSTEDTPNHFEKFISQVFIKGFDSHMRSADLKFIKNPRNQGLEQSEIEEMSFDIKVEPSFLKNKDDYIAFWTFCKMLDARHLSELRNEMIKYDGHLTGEQEIIGLALLGVDSRENDWKQFFSSEREYEKIMKGYVGEELYQREPYRQSDGKTPILFRGVEQARKYGTETVIQRLFDASPEFKVSKCNITEWERQKETIEETIERRKELHNEWEKNPKKPQNNAFFKEYKECCDAIDAYNWHKNKTTLVYVNELHHLLIEILGRYVGYVAIADRDFQCMANQYFKHSGITERVEYWGDNRLKSIKKLDTFLKKEGLFVSEKNARNHIAHLNYLSLKSECTLLYLSERLREIFKYDRKLKNAVSKSLIDILDRHGMSVVFANLKENKHRLVIKSLEPKKLRHLGEKKIDNGYIETNQVSEEYCGIVKRLLEI

SEQ ID NO: 74 - protein, 1051 aa, Listeriaceae bacterium
MKITKMRVDGRTIVMERTSKEGQLGYEGIDGNKTTEIIFDKKKESFYKSILNKTVRKPDEKEKNRRKQAINKAINKEITELMLAVLHQEVPSQKLHNLKSLNTESLTKLFKPKFQNMISYPPSKGAEHVQFCLTDIAVPAIRDLDEIKPDWGIFFEKLKPYTDWAESYIHYKQTTIQKSIEQNKIQSPDSPRKLVLQKYVTAFLNGEPLGLDLVAKKYKLADLAESFKLVDLNEDKSANYKIKACLQQHQRNILDELKEDPELNQYGIEVKKYIQRYFPIKRAPNRSKHARADFLKKELIESTVEQQFKNAVYHYVLEQGKMEAYELTDPKTKDLQDIRSGEAFSFKFINACAFASNNLKMILNPECEKDILGKGNFKKNLPNSTTRSDVVKKMIPFFSDELQNVNFDEAIWAIRGSIQQIRNEVYHCKKHSWKSILKIKGFEFEPNNMKYADSDMQKLMDKDIAKIPEFIEEKLKSSGVVRFYRHDELQSIWEMKQGFSLLTTNAPFVPSFKRVYAKGHDYQTSKNRYYNLDLTTFDILEYGEEDFRARYFLTKLVYYQQFMPWFTADNNAFRDAANFVLRLNKNRQQDAKAFINIREVEEGEMPRDYMGYVQGQIAIHEDSIEDTPNHFEKFISQVFIKGFDRHMRSANLKFIKNPRNQGLEQSEIEEMSFDIKVEPSFLKNKDDYIAFWIFCKMLDARHLSELRNEMIKYDGHLTGEQEIIGLALLGVDSRENDWKQFFSSEREYEKIMKGYVVEELYQREPYRQSDGKTPILFRGVEQARKYGTETVIQRLFDANPEFKVSKCNLAEWERQKETIEETIKRRKELHNEWAKNPKKPQNNAFFKEYKECCDAIDAYNWHKNKTTLAYVNELHHLLIEILGRYVGYVAIADRDFQCMANQYFKHSGITERVEYWGDNRLKSIKKLDTFLKKEGLFVSEKNARNHIAHLNYLSLKSECTLLYLSERLREIFKYDRKLKNAVSKSLIDILDRHGMSVVFANLKENKHRLVIKSLEPKKLRHLGGKKIDGGYIETNQVSEEYCGIVKRLLEM

SEQ ID NO: 75 - protein, 1152 aa, Leptotrichia wadei
MKVTKVDGISHKKYIEEGKLVKSTSEENRTSERLSELLSIRLDIYIKNPDNASEEENRIRRENLKKFFSNKVLHLKDSVLYLKNRKEKNAVQDKNYSEEDISEYDLKNKNSFSVLKKILLNEDVNSEELEIFRKDVEAKLNKINSLKYSFEENKANYQKINENNVEKVGGKSKRNIIYDYYRESAKRNDYINNVQEAFDKLYKKEDIEKLFFLIENSKKHEKYKIREYYHKIIGRKNDKENFAKIIYEEIQNVNNIKELIEKIPDMSELKKSQVFYKYYLDKEELNDKNIKYAFCHFVEIEMSQLLKNYVYKRLSNISNDKIKRIFEYQNLKKLIENKLLNKLDTYVRNCGKYNYYLQVGEIATSDFIARNRQNEAFLRNIIGVSSVAYFSLRNILETENENDITGRMRGKTVKNNKGEEKYVSGEVDKIYNENKQNEVKENLKMFYSYDFNMDNKNEIEDFFANIDEAISSIRHGIVHFNLELEGKDIFAFKNIAPSEISKKMFQNEINEKKLKLKIFKQLNSANVFNYYEKDVIIKYLKNTKFNFVNKNIPFVPSFTKLYNKIEDLRNTLKFFWSVPKDKEEKDAQIYLLKNIYYGEFLNKFVKNSKVFFKITNEVIKINKQRNQKTGHYKYQKFENIEKTVPVEYLAIIQSREMINNQDKEEKNTYIDFIQQIFLKGFIDYLNKNNLKYIESNNNNDNNDIFSKIKIKKDNKEKYDKILKNYEKHNRNKEIPHEINEFVREIKLGKILKYTENLNMFYLILKLLNHKELTNLKGSLEKYQSANKEETFSDELELINLLNLDNNRVTEDFELEANEIGKFLDFNENKIKDRKELKKFDTNKIYFDGENIIKHRAFYNIKKYGMLNLLEKIADKAKYKISLKELKEYSNKKNEIEKNYTMQQNLHRKYARPKKDEKFNDEDYKEYEKAIGNIQKYTHLKNKVEFNELNLLQGLLLKILHRLVGYTSIWERDLRFRLKGEFPENHYIEEIFNFDNSKNVKYKSGQIVEKYINFYKELYKDNVEKRSIYSDKKVKKLKQEKKDLYIRNYIAHFNYIPHAEISLLEVLENLRKLLSYDRKLKNAIMKSIVDILKEYGFVATFKIGADKKIEIQTLESEKIVHLKNLKKKKLMTDRNSEELCELVKVMFEYKALE

SEQ ID NO: 76 - protein, 1285 aa, Rhodobacter capsulatus
MQIGKVQGRTISEFGDPAGGLKRKISTDGKNRKELPAHLSSDPKALIGQWISGIDKIYRKPDSRKSDGKAIHSPTPSKMQFDARDDLGEAFWKLVSEAGLAQDSDYDQFKRRLHPYGDKFQPADSGAKLKFEADPPEPQAFHGRWYGAMSKRGNDAKELAAALYEHLHVDEKRIDGQPKRNPKTDKFAPGLVVARALGIESSVLPRGMARLARNWGEEEIQTYFVVDVAASVKEVAKAAVSAAQAFDPPRQVSGRSLSPKVGFALAEHLERVTGSKRCSFDPAAGPSVLALHDEVKKTYKRLCARGKNAARAFPADKTELLALMRHTHENRVRNQMVRMGRVSEYRGQQAGDLAQSHYWTSAGQTEIKESEIFVRLWVGAFALAGRSMKAWIDPMGKIVNTEKNDRDLTAAVNIRQVISNKEMVAEAMARRGIYFGETPELDRLGAEGNEGFVFALLRYLRGCRNQTFHLGARAGFLKEIRKELEKTRWGKAKEAEHVVLTDKTVAAIRAIIDNDAKALGARLLADLSGAFVAHYASKEHFSTLYSEIVKAVKDAPEVSSGLPRLKLLLKRADGVRGYVHGLRDTRKHAFATKLPPPPAPRELDDPATKARYIALLRLYDGPFRAYASGITGTALAGPAARAKEAATALAQSVNVTKAYSDVMEGRTSRLRPPNDGETLREYLSALTGETATEFRVQIGYESDSENARKQAEFIENYRRDMLAFMFEDYIRAKGFDWILKIEPGATAMTRAPVLPEPIDTRGQYEHWQAALYLVMHFVPASDVSNLLHQLRKWEALQGKYELVQDGDATDQADARREALDLVKRFRDVLVLFLKTGEARFEGRAAPFDLKPFRALFANPATFDRLFMATPTTARPAEDDPEGDGASEPELRVARTLRGLRQIARYNHMAVLSDLFAKHKVRDEEVARLAEIEDETQEKSQIVAAQELRTDLHDKVMKCHPKTISPEERQSYAAAIKTIEEHRFLVGRVYLGDHLRLHRLMMDVIGRLIDYAGAYERDTGTFLINASKQLGAGADWAVTIAGAANTDARTQTRKDLAHFNVLDRADGTPDLTALVNRAREMMAYDRKRKNAVPRSILDMLARLGLTLKWQMKDHLLQDATITQAAIKHLDKVRLTVGGPAAVTEARFSQDYLQMVAAVFNGSVQNPKPRRRDDGDAWHKPPKPATAQSQPDQKPPNKAPSAGSRLPPPQVGEVYEGVVVKVIDTGSLGFLAVEGVAGNIGLHISRLRRIREDAIIVGRRYRFRVEIYVPPKSNTSKLNAADLVRID

SEQ ID NO: 77 - protein, 1285 aa, Rhodobacter capsulatus
MQIGKVQGRTISEFGDPAGGLKRKISTDGKNRKELPAHLSSDPKALIGQWISGIDKIYRKPDSRKSDGKAIHSPTPSKMQFDARDDLGEAFWKLVSEAGLAQDSDYDQFKRRLHPYGDKFQPADSGAKLKFEADPPEPQAFHGRWYGAMSKRGNDAKELAAALYEHLHVDEKRIDGQPKRNPKTDKFAPGLVVARALGIESSVLPRGMARLARNWGEEEIQTYFVVDVAASVKEVAKAAVSAAQAFDPPRQVSGRSLSPKVGFALAEHLERVTGSKRCSFDPAAGPSVLALHDEVKKTYKRLCARGKNAARAFPADKTELLALMRHTHENRVRNQMVRMGRVSEYRGQQAGDLAQSHYWTSAGQTEIKESEIFVRLWVGAFALAGRSMKAWIDPMGKIVNTEKNDRDLTAAVNIRQVISNKEMVAEAMARRGIYFGETPELDRLGAEGNEGFVFALLRYLRGCRNQTFHLGARAGFLKEIRKELEKTRWGKAKEAEHVVLTDKTVAAIRAIIDNDAKALGARLLADLSGAFVAHYASKEHFSTLYSEIVKAVKDAPEVSSGLPRLKLLLKRADGVRGYVHGLRDTRKHAFATKLPPPPAPRELDDPATKARYIALLRLYDGPFRAYASGITGTALAGPAARAKEAATALAQSVNVTKAYSDVMEGRSSRLRPPNDGETLREYLSALTGETATEFRVQIGYESDSENARKQAEFIENYRRDMLAFMFEDYIRAKGFDWILKIEPGATAMTRAPVLPEPIDTRGQYEHWQAALYLVMHFVPASDVSNLLHQLRKWEALQGKYELVQDGDATDQADARREALDLVKRFRDVLVLFLKTGEARFEGRAAPFDLKPFRALFANPATFDRLFMATPTTARPAEDDPEGDGASEPELRVARTLRGLRQIARYNHMAVLSDLFAKHKVRDEEVARLAEIEDETQEKSQIVAAQELRTDLHDKVMKCHPKTISPEERQSYAAAIKTIEEHRFLVGRVYLGDHLRLHRLMMDVIGRLIDYAGAYERDTGTFLINASKQLGAGADWAVTIAGAANTDARTQTRKDLAHFNVLDRADGTPDLTALVNRAREMMAYDRKRKNAVPRSILDMLARLGLTLKWQMKDHLLQDATITQAAIKHLDKVRLTVGGPAAVTEARFSQDYLQMVAAVFNGSVQNPKPRRRDDGDAWHKPPKPATAQSQPDQKPPNKAPSAGSRLPPPQVGEVYEGVVVKVIDTGSLGFLAVEGVAGNIGLHISRLRRIREDAIIVGRRYRFRVEIYVPPKSNTSKLNAADLVRID

SEQ ID NO: 78 - protein, 1285 aa, Rhodobacter capsulatus; identical to SEQ ID NO: 77

SEQ ID NO: 79 - protein, 1389 aa, Artificial Sequence
  Synthetic
MGNLFGHKRWYEVRDKKDFKIKRKVKVKRNYDGNKYILNINENNNKEKIDNNKFIRKYINYKKNDNILKEFTRKFHAGNILFKLKGKEGIIRIENNDDFLETEEVVLYIEAYGKSEKLKALGITKKKIIDEAIRQGITKDDKKIEIKRQENEEEIEIDIRDEYTNKTLNDCSIILRIIENDELETKKSIYEIFKNINMSLYKIIEKIIENETEKVFENRYYEEHLREKLLKDDKIDVILTNFMEIREKIKSNLEILGFVKFYLNVGGDKKKSKNKKMLVEKILNINVDLTVEDIADFVIKELEFWNITKRIEKVKKVNNEFLEKRRNRTYIKSYVLLDKHEKFKIERENKKDKIVKFFVENIKNNSIKEKIEKILAEFKIDELIKKLEKELKKGNCDTEIFGIFKKHYKVNFDSKKFSKKSDEEKELYKIIYRYLKGRIEKILVNEQKVRLKKMEKIEIEKILNESILSEKILKRVKQYTLEHIMYLGKLRHNDIDMTTVNTDDFSRLHAKEELDLELITFFASTNMELNKIFSRENINNDENIDFFGGDREKNYVLDKKILNSKIKIIRDLDFIDNKNNITNNFIRKFTKIGTNERNRILHAISKERDLQGTQDDYNKVINIIQNLKISDEEVSKALNLDVVFKDKKNIITKINDIKISEENNNDIKYLPSFSKVLPEILNLYRNNPKNEPFDTIETEKIVLNALIYVNKELYKKLILEDDLEENESKNIFLQELKKTLGNIDEIDENIIENYYKNAQISASKGNNKAIKKYQKKVIECYIGYLRKNYEELFDFSDFKMNIQEIKKQIKDINDNKTYERITVKTSDKTIVINDDFEYIISIFALLNSNAVINKIRNRFFATSVWLNTSEYQNIIDILDEIMQLNTLRNECITENWNLNLEEFIQKMKEIEKDFDDFKIQTKKEIFNNYYEDIKNNILTEFKDDINGCDVLEKKLEKIVIFDDETKFEIDKKSNILQDEQRKLSNINKKDLKKKVDQYIKDKDQEIKSKILCRIIFNSDFLKKYKKEIDNLIEDMESENENKFQEIYYPKERKNELYIYKKNLFLNIGNPNFDKIYGLISNDIKMADAKFLFNIDGKNIRKNKISEIDAILKNLNDKLNGYSKEYKEKYIKKLKENDDFFAKNIQNKNYKSFEKDYNRVSEYKKIRDLVEFNYLNKIESYLIDINWKLAIQMARFERDMHYIVNGLRELGIIKLSGYNTGISRAYPKRNGSDGFYTTTAYYKFFDEESYKKFEKICYGFGIDLSENSEINKPENESIRNYISHFYIVRNPFADYSIAEQIDRVSNLLSYSTRYNNSTYASVFEVFKKDVNLDYDELKKKFKLIGNNDILERLMKPKKVSVLELESYNSDYIKNLIIELLTKIENTNDTL

SEQ ID NO: 80 - protein, 1197 aa, L wadei
MKVTKVDGISHKKYIEEGKLVKSTSEENRTSERLSELLSIRLDIYIKNPDNASEEENRIRRENLKKFFSNKVLHLKDSVLYLKNRKEKNAVQDKNYSEEDISEYDLKNKNSFSVLKKILLNEDVNSEELEIFRKDVEAKLNKINSLKYSFEENKANYQKINENNVEKVGGKSKRNIIYDYYRESAKRNDYINNVQEAFDKLYKKEDIEKLFFLIENSKKHEKYKIREYYHKIIGRKNDKENFAKIIYEEIQNVNNIKELIEKIPDMSELKKSQVFYKYYLDKEELNDKNIKYAFCHFVEIEMSQLLKNYVYKRLSNISNDKIKRIFEYQNLKKLIENKLLNKLDTYVRNCGKYNYYLQVGEIATSDFIARNRQNEAFLRNIIGVSSVAYFSLRNILETENENDITGRMRGKTVKNNKGEEKYVSGEVDKIYNENKQNEVKENLKMFYSYDFNMDNKNEIEDFFANIDEAISSIRHGIVHFNLELEGKDIFAFKNIAPSEISKKMFQNEINEKKLKLKIFKQLNSANVFNYYEKDVIIKYLKNTKFNFVNKNIPFVPSFTKLYNKIEDLRNTLKFFWSVPKDKEEKDAQIYLLKNIYYGEFLNKFVKNSKVFFKITNEVIKINKQRNQKTGHYKYQKFENIEKTVPVEYLAIIQSREMINNQDKEEKNTYIDFIQQIFLKGFIDYLNKNNLKYIESNNNNDNNDIFSKIKIKKDNKEKYDKILKNYEKHNRNKEIPHEINEFVREIKLGKILKYTENLNMFYLILKLLNHKELTNLKGSLEKYQSANKEETFSDELELINLLNLDNNRVTEDFELEANEIGKFLDFNENKIKDRKELKKFDTNKIYFDGENIIKHRAFYNIKKYGMLNLLEKIADKAKYKISLKELKEYSNKKNEIEKNYTMQQNLHRKYARPKKDEKFNDEDYKEYEKAIGNIQKYTHLKNKVEFNELNLLQGLLLKILHRLVGYTSIWERDLRFRLKGEFPENHYIEEIFNFDNSKNVKYKSGQIVEKYINFYKELYKDNVEKRSIYSDKKVKKLKQEKKDLYIRNYIAHFNYIPHAEISLLEVLENLRKLLSYDRKLKNAIMKSIVDILKEYGFVATFKIGADKKIEIQTLESEKIVHLKNLKKKKLMTDRNSEELCELVKVMFEYKALEKRPAATKKAGQAKKKKGSYPYDVPDYAYPYDVPDYAYPYDVPDYA

SEQ ID NO: 81 - protein, 1120 aa, Listeria seeligeri
MWISIKTLIHHLGVLFFCDYMYNRREKKIIEVKTMRITKVEVDRKKVLISRDKNGGKLVYENEMQDNTEQIMHHKKSSFYKSVVNKTICRPEQKQMKKLVHGLLQENSQEKIKVSDVTKLNISNFLNHRFKKSLYYFPENSPDKSEEYRIEINLSQLLEDSLKKQQGTFICWESFSKDMELYINWAENYISSKTKLIKKSIRNNRIQSTESRSGQLMDRYMKDILNKNKPFDIQSVSEKYQLEKLTSALKATFKEAKKNDKEINYKLKSTLQNHERQIIEELKENSELNQFNIEIRKHLETYFPIKKTNRKVGDIRNLEIGEIQKIVNHRLKNKIVQRILQEGKLASYEIESTVNSNSLQKIKIEEAFALKFINACLFASNNLRNMVYPVCKKDILMIGEFKNSFKEIKHKKFIRQWSQFFSQEITVDDIELASWGLRGAIAPIRNEIIHLKKHSWKKFFNNPTFKVKKSKIINGKTKDVTSEFLYKETLFKDYFYSELDSVPELIINKMESSKILDYYSSDQLNQVFTIPNFELSLLTSAVPFAPSFKRVYLKGFDYQNQDEAQPDYNLKLNIYNEKAFNSEAFQAQYSLFKMVYYQVFLPQFTTNNDLFKSSVDFILTLNKERKGYAKAFQDIRKMNKDEKPSEYMSYIQSQLMLYQKKQEEKEKINHFEKFINQVFIKGFNSFIEKNRLTYICHPTKNTVPENDNIEIPFHTDMDDSNIAFWLMCKLLDAKQLSELRNEMIKFSCSLQSTEEISTFTKAREVIGLALLNGEKGCNDWKELFDDKEAWKKNMSLYVSEELLQSLPYTQEDGQTPVINRSIDLVKKYGTETILEKLFSSSDDYKVSAKDIAKLHEYDVTEKIAQQESLHKQWIEKPGLARDSAWTKKYQNVINDISNYQWAKTKVELTQVRHLHQLTIDLLSRLAGYMSIADRDFQFSSNYILERENSEYRVTSWILLSENKNKNKYNDYELYNLKNASIKVSSKNDPQLKVDLKQLRLTLEYLELFDNRLKEKRNNISHFNYLNGQLGNSILELFDDARDVLSYDRKLKNAVSKSLKEILSSHGMEVTFKPLYQTNHHLKIDKLQPKKIHHLGEKSTVSSNQVSNEYCQLVRTLLTMK

SEQ ID NO: 82 - protein, 1159 aa, Leptotrichia buccalis
MKVTKVGGISHKKYTSEGRLVKSESEENRTDERLSALLNMRLDMYIKNPSSTETKENQKRIGKLKKFFSNKMVYLKDNTLSLKNGKKENIDREYSETDILESDVRDKKNFAVLKKIYLNENVNSEELEVFRNDIKKKLNKINSLKYSFEKNKANYQKINENNIEKVEGKSKRNIIYDYYRESAKRDAYVSNVKEAFDKLYKEEDIAKLVLEIENLTKLEKYKIREFYHEIIGRKNDKENFAKIIYEEIQNVNNMKELIEKVPDMSELKKSQVFYKYYLDKEELNDKNIKYAFCHFVEIEMSQLLKNYVYKRLSNISNDKIKRIFEYQNLKKLIENKLLNKLDTYVRNCGKYNYYLQDGEIATSDFIARNRQNEAFLRNIIGVSSVAYFSLRNILETENENDITGRMRGKTVKNNKGEEKYVSGEVDKIYNENKKNEVKENLKMFYSYDFNMDNKNEIEDFFANIDEAISSIRHGIVHFNLELEGKDIFAFKNIAPSEISKKMFQNEINEKKLKLKIFRQLNSANVFRYLEKYKILNYLKRTRFEFVNKNIPFVPSFTKLYSRIDDLKNSLGIYWKTPKTNDDNKTKEIIDAQIYLLKNIYYGEFLNYFMSNNGNFFEISKEIIELNKNDKRNLKTGFYKLQKFEDIQEKIPKEYLANIQSLYMINAGNQDEEEKDTYIDFIQKIFLKGFMTYLANNGRLSLIYIGSDEETNTSLAEKKQEFDKFLKKYEQNNNIKIPYEINEFLREIKLGNILKYTERLNMFYLILKLLNHKELTNLKGSLEKYQSANKEEAFSDQLELINLLNLDNNRVTEDFELEADEIGKFLDFNGNKVKDNKELKKFDTNKIYFDGENIIKHRAFYNIKKYGMLNLLEKIADKAGYKISIEELKKYSNKKNEIEKNHKMQENLHRKYARPRKDEKFTDEDYESYKQAIENIEEYTHLKNKVEFNELNLLQGLLLRILHRLVGYTSIWERDLRFRLKGEFPENQYIEEIFNFENKKNVKYKGGQIVEKYIKFYKELHQNDEVKINKYSSANIKVLKQEKKDLYIRNYIAHFNYIPHAEISLLEVLENLRKLLSYDRKLKNAVMKSVVDILKEYGFVATFKIGADKKIGIQTLESEKIVHLKNLKKKKLMTDRNSEELCKLVKIMFEYKMEEKKSEN

SEQ ID NO: 83 - protein, 1285 aa, Herbinix hemicellulosilytica
MKLTRRRISGNSVDQKITAAFYRDMSQGLLYYDSEDNDCTDKVIESMDFERSWRGRILKNGEDDKNPFYMFVKGLVGSNDKIVCEPIDVDSDPDNLDILINKNLTGFGRNLKAPDSNDTLENLIRKIQAGIPEEEVLPELKKIKEMIQKDIVNRKEQLLKSIKNNRIPFSLEGSKLVPSTKKMKWLFKLIDVPNKTFNEKMLEKYWEIYDYDKLKANITNRLDKTDKKARSISRAVSEELREYHKNLRTNYNRFVSGDRPAAGLDNGGSAKYNPDKEEFLLFLKEVEQYFKKYFPVKSKHSNKSKDKSLVDKYKNYCSYKVVKKEVNRSIINQLVAGLIQQGKLLYYFYYNDTWQEDFLNSYGLSYIQVEEAFKKSVMTSLSWGINRLTSFFIDDSNTVKFDDITTKKAKEAIESNYFNKLRTCSRMQDHFKEKLAFFYPVYVKDKKDRPDDDIENLIVLVKNAIESVSYLRNRTFHFKESSLLELLKELDDKNSGQNKIDYSVAAEFIKRDIENLYDVFREQIRSLGIAEYYKADMISDCFKTCGLEFALYSPKNSLMPAFKNVYKRGANLNKAYIRDKGPKETGDQGQNSYKALEEYRELTWYIEVKNNDQSYNAYKNLLQLIYYHAFLPEVRENEALITDFINRTKEWNRKETEERLNTKNNKKHKNFDENDDITVNTYRYESIPDYQGESLDDYLKVLQRKQMARAKEVNEKEEGNNNYIQFIRDVVVWAFGAYLENKLKNYKNELQPPLSKENIGLNDTLKELFPEEKVKSPFNIKCRFSISTFIDNKGKSTDNTSAEAVKTDGKEDEKDKKNIKRKDLLCFYLFLRLLDENEICKLQHQFIKYRCSLKERRFPGNRTKLEKETELLAELEELMELVRFTMPSIPEISAKAESGYDTMIKKYFKDFIEKKVFKNPKTSNLYYHSDSKTPVTRKYMALLMRSAPLHLYKDIFKGYYLITKKECLEYIKLSNIIKDYQNSLNELHEQLERIKLKSEKQNGKDSLYLDKKDFYKVKEYVENLEQVARYKHLQHKINFESLYRIFRIHVDIAARMVGYTQDWERDMHFLFKALVYNGVLEERRFEAIFNNNDDNNDGRIVKKIQNNLNNKNRELVSMLCWNKKLNKNEFGAIIWKRNPIAHLNHFTQTEQNSKSSLESLINSLRILLAYDRKRQNAVTKTINDLLLNDYHIRIKWEGRVDEGQIYFNIKEKEDIENEPIIHLKHLHKKDCYIYKNSYMFDKQKEWICNGIKEEVYDKSILKCIGNLFKFDYEDKNKSSANPKHT

SEQ ID NO: 84 - protein, 1344 aa, Eubacterium rectale
MLRRDKEVKKLYNVFNQIQVGTKPKKWNNDEKLSPEENERRAQQKNIKMKNYKWREACSKYVESSQRIINDVIFYSYRKAKNKLRYMRKNEDILKKMQEAEKLSKFSGGKLEDFVAYTLRKSLVVSKYDTQEFDSLAAMVVFLECIGKNNISDHEREIVCKLLELIRKDFSKLDPNVKGSQGANIVRSVRNQNMIVQPQGDRFLFPQVYAKENETVTNKNVEKEGLNEFLLNYANLDDEKRAESLRKLRRILDVYFSAPNHYEKDMDITLSDNIEKEKFNVWEKHECGKKETGLFVDIPDVLMEAEAENIKLDAVVEKRERKVLNDRVRKQNIICYRYTRAVVEKYNSNEPLFFENNAINQYWIHHIENAVERILKNCKAGKLFKLRKGYLAEKVWKDAINLISIKYIALGKAVYNFALDDIWKDKKNKELGIVDERIRNGITSFDYEMIKAHENLQRELAVDIAFSVNNLARAVCDMSNLGNKESDFLLWKRNDIADKLKNKDDMASVSAVLQFFGGKSSWDINIFKDAYKGKKKYNYEVRFIDDLRKAIYCARNENFHFKTALVNDEKWNTELFGKIFERETEFCLNVEKDRFYSNNLYMFYQVSELRNMLDHLYSRSVSRAAQVPSYNSVIVRTAFPEYITNVLGYQKPSYDADTLGKWYSACYYLLKEIYYNSFLQSDRALQLFEKSVKTLSWDDKKQQRAVDNFKDHFSDIKSACTSLAQVCQIYMTEYNQQNNQIKKVRSSNDSIFDQPVYQHYKVLLKKAIANAFADYLKNNKDLFGFIGKPFKANEIREIDKEQFLPDWTSRKYEALCIEVSGSQELQKWYIVGKFLNARSLNLMVGSMRSYIQYVTDIKRRAASIGNELHVSVHDVEKVEKWVQVIEVCSLLASRTSNQFEDYFNDKDDYARYLKSYVDFSNVDMPSEYSALVDFSNEEQSDLYVDPKNPKVNRNIVHSKLFAADHILRDIVEPVSKDNIEEFYSQKAEIAYCKIKGKEITAEEQKAVLKYQKLKNRVELRDIVEYGEIINELLGQLINWSFMRERDLLYFQLGFHYDCLRNDSKKPEGYKNIKVDENSIKDAILYQIIGMYVNGVTVYAPEKDGDKLKEQCVKGGVGVKVSAFHRYSKYLGLNEKTLYNAGLEIFEVVAEHEDIINLRNGIDHFKYYLGDYRSMLSIYSEVFDRFFTYDIKYQKNVLNLLQNILLRHNVIVEPILESGFKTIGEQTKPGAKLSIRSIKSDTFQYKVKGGTLITDAKDERYLETIRKILYYAENEEDNLKKSVVVTNADKYEKNKESDDQNKQKEKKNKDNKGKKNEETKSDAEKNNNERLSYNPFANLNFKLSN

SEQ ID NO: 85 - protein, 1373 aa, Eubacteriaceae bacterium
MKISKESHKRTAVAVMEDRVGGVVYVPGGSGIDLSNNLKKRSMDTKSLYNVFNQIQAGTAPSEYEWKDYLSEAENKKREAQKMIQKANYELRRECEDYAKKANLAVSRIIFSKKPKKIFSDDDIISHMKKQRLSKFKGRMEDFVLIALRKSLVVSTYNQEVFDSRKAATVFLKNIGKKNISADDERQIKQLMALIREDYDKWNPDKDSSDKKESSGTKVIRSIEHQNMVIQPEKNKLSLSKISNVGKKTKTKQKEKAGLDAFLKEYAQIDENSRMEYLKKLRRLLDTYFAAPSSYIKGAAVSLPENINFSSELNVWERHEAAKKVNINFVEIPESLLNAEQNNNKINKVEQEHSLEQLRTDIRRRNITCYHFANALAADERYHTLFFENMAMNQFWIHHMENAVERILKKCNVGTLFKLRIGYLSEKVWKDMLNLLSIKYIALGKAVYHFALDDIWKADIWKDASDKNSGKINDLTLKGISSFDYEMVKAQEDLQREMAVGVAFSTNNLARVTCKMDDLSDAESDFLLWNKEAIRRHVKYTEKGEILSAILQFFGGRSLWDESLFEKAYSDSNYELKFLDDLKRAIYAARNETFHFKTAAIDGGSWNTRLFGSLFEKEAGLCLNVEKNKFYSNNLVLFYKQEDLRVFLDKLYGKECSRAAQIPSYNTILPRKSFSDFMKQLLGLKEPVYGSAILDQWYSACYYLFKEVYYNLFLQDSSAKALFEKAVKALKGADKKQEKAVESFRKRYWEISKNASLAEICQSYITEYNQQNNKERKVRSANDGMFNEPIYQHYKMLLKEALKMAFASYIKNDKELKFVYKPTEKLFEVSQDNFLPNWNSEKYNTLISEVKNSPDLQKWYIVGKFMNARMLNLLLGSMRSYLQYVSDIQKRAAGLGENQLHLSAENVGQVKKWIQVLEVCLLLSVRISDKFTDYFKDEEEYASYLKEYVDFEDSAMPSDYSALLAFSNEGKIDLYVDASNPKVNRNIIQAKLYAPDMVLKKVVKKISQDECKEFNEKKEQIMQFKNKGDEVSWEEQQKILEYQKLKNRVELRDLSEYGELINELLGQLINWSYLRERDLLYFQLGFHYSCLMNESKKPDAYKTIRRGTVSIENAVLYQIIAMYINGFPVYAPEKGELKPQCKTGSAGQKIRAFCQWASMVEKKKYELYNAGLELFEVVKEHDNIIDLRNKIDHFKYYQGNDSILALYGEIFDRFFTYDMKYRNNVLNHLQNILLRHNVIIKPIISKDKKEVGRGKMKDRAAFLLEEVSSDRFTYKVKEGERKIDAKNRLYLETVRDILYFPNRAVNDKGEDVIICSKKAQDLNEKKADRDKNHDKSKDTNQKKEGKNQEEKSENKEPYSDRMTWKPFAGIKLE

SEQ ID NO: 86 - protein, 1276 aa, Blautia sp.
MKISKVDHVKSGIDQKLSSQRGMLYKQPQKKYEGKQLEEHVRNLSRKAKALYQVFPVSGNSKMEKELQIINSFIKNILLRLDSGKTSEEIVGYINTYSVASQISGDHIQELVDQHLKESLRKYTCVGDKRIYVPDIIVALLKSKFNSETLQYDNSELKILIDFIREDYLKEKQIKQIVHSIENNSTPLRIAEINGQKRLIPANVDNPKKSYIFEFLKEYAQSDPKGQESLLQHMRYLILLYLYGPDKITDDYCEEIEAWNFGSIVMDNEQLFSEEASMLIQDRIYVNQQIEEGRQSKDTAKVKKNKSKYRMLGDKIEHSINESVVKHYQEACKAVEEKDIPWIKYISDHVMSVYSSKNRVDLDKLSLPYLAKNTWNTWISFIAMKYVDMGKGVYHFAMSDVDKVGKQDNLIIGQIDPKFSDGISSFDYERIKAEDDLHRSMSGYIAFAVNNFARAICSDEFRKKNRKEDVLTVGLDEIPLYDNVKRKLLQYFGGASNWDDSIIDIIDDKDLVACIKENLYVARNVNFHFAGSEKVQKKQDDILEEIVRKETRDIGKHYRKVFYSNNVAVFYCDEDIIKLMNHLYQREKPYQAQIPSYNKVISKTYLPDLIFMLLKGKNRTKISDPSIMNMFRGTFYFLLKEIYYNDFLQASNLKEMFCEGLKNNVKNKKSEKPYQNFMRRFEELENMGMDFGEICQQIMTDYEQQNKQKKKTATAVMSEKDKKIRTLDNDTQKYKHFRTLLYIGLREAFIIYLKDEKNKEWYEFLREPVKREQPEEKEFVNKWKLNQYSDCSELILKDSLAAAWYVVAHFINQAQLNHLIGDIKNYIQFISDIDRRAKSTGNPVSESTEIQIERYRKILRVLEFAKFFCGQITNVLTDYYQDENDFSTHVGHYVKFEKKNMEPAHALQAFSNSLYACGKEKKKAGFYYDGMNPIVNRNITLASMYGNKKLLENAMNPVTEQDIRKYYSLMAELDSVLKNGAVCKSEDEQKNLRHFQNLKNRIELVDVLTLSELVNDLVAQLIGWVYIRERDMMYLQLGLHYIKLYFTDSVAEDSYLRTLDLEEGSIADGAVLYQIASLYSFNLPMYVKPNKSSVYCKKHVNSVATKFDIFEKEYCNGDETVIENGLRLFENINLHKDMVKFRDYLAHFKYFAKLDESILELYSKAYDFFFSYNIKLKKSVSYVLTNVLLSYFINAKLSFSTYKSSGNKTVQHRTTKISVVAQTDYFTYKLRSIVKNKNGVESIENDDRRCEVVNIAARDKEFVDEVCNVINYNSDK

SEQ ID NO: 87 - protein, 1385 aa, Leptotrichia sp.
MGNLFGHKRWYEVRDKKDFKIKRKVKVKRNYDGNKYILNINENNNKEKIDNNKFIGEFVNYKKNNNVLKEFKRKFHAGNILFKLKGKEEIIRIENNDDFLETEEVVLYIEVYGKSEKLKALEITKKKIIDEAIRQGITKDDKKIEIKRQENEEEIEIDIRDEYTNKTLNDCSIILRIIENDELETKKSIYEIFKNINMSLYKIIEKIIENETEKVFENRYYEEHLREKLLKDNKIDVILTNFMEIREKIKSNLEIMGFVKFYLNVSGDKKKSENKKMFVEKILNTNVDLTVEDIVDFIVKELKFWNITKRIEKVKKFNNEFLENRRNRTYIKSYVLLDKHEKFKIERENKKDKIVKFFVENIKNNSIKEKIEKILAEFKINELIKKLEKELKKGNCDTEIFGIFKKHYKVNFDSKKFSNKSDEEKELYKIIYRYLKGRIEKILVNEQKVRLKKMEKIEIEKILNESILSEKILKRVKQYTLEHIMYLGKLRHNDIVKMTVNTDDFSRLHAKEELDLELITFFASTNMELNKIFNGKEKVTDFFGFNLNGQKITLKEKVPSFKLNILKKLNFINNENNIDEKLSHFYSFQKEGYLLRNKILHNSYGNIQETKNLKGEYENVEKLIKELKVSDEEISKSLSLDVIFEGKVDIINKINSLKIGEYKDKKYLPSFSKIVLEITRKFREINKDKLFDIESEKIILNAVKYVNKILYEKITSNEENEFLKTLPDKLVKKSNNKKENKNLLSIEEYYKNAQVSSSKGDKKAIKKYQNKVTNAYLEYLENTFTEIIDFSKFNLNYDEIKTKIEERKDNKSKIIIDSISTNINITNDIEYIISIFALLNSNTYINKIRNRFFATSVWLEKQNGTKEYDYENIISILDEVLLINLLRENNITDILDLKNAIIDAKIVENDETYIKNYIFESNEEKLKKRLFCEELVDKEDIRKIFEDENFKFKSFIKKNEIGNFKINFGILSNLECNSEVEAKKIIGKNSKKLESFIQNIIDEYKSNIRTLFSSEFLEKYKEEIDNLVEDTESENKNKFEKIYYPKEHKNELYIYKKNLFLNIGNPNFDKIYGLISKDIKNVDTKILFDDDIKKNKISEIDAILKNLNDKLNGYSNDYKAKYVNKLKENDDFFAKNIQNENYSSFGEFEKDYNKVSEYKKIRDLVEFNYLNKIESYLIDINWKLAIQMARFERDMHYIVNGLRELGIIKLSGYNTGISRAYPKRNGSDGFYTTTAYYKFFDEESYKKFEKICYGFGIDLSENSEINKPENESIRNYISHFYIVRNPFADYSIAEQIDRVSNLLSYSTRYNNSTYASVFEVFKKDVNLDYDELKKKFRLIGNNDILERLMKPKKVSVLELESYNSDYIKNLIIELLTKIENTNDTL

SEQ ID NO: 88 - protein, 1334 aa, Lachnospiraceae bacterium
MKISKVDHTRMAVAKGNQHRRDEISGILYKDPTKTGSIDFDERFKKLNCSAKILYHVFNGIAEGSNKYKNIVDKVNNNLDRVLFTGKSYDRKSIIDIDTVLRNVEKINAFDRISTEEREQIIDDLLEIQLRKGLRKGKAGLREVLLIGAGVIVRTDKKQEIADFLEILDEDFNKTNQAKNIKLSIENQGLVVSPVSRGEERIFDVSGAQKGKSSKKAQEKEALSAFLLDYADLDKNVRFEYLRKIRRLINLYFYVKNDDVMSLTEIPAEVNLEKDFDIWRDHEQRKEENGDFVGCPDILLADRDVKKSNSKQVKIAERQLRESIREKNIKRYRFSIKTIEKDDGTYFFANKQISVFWIHRIENAVERILGSINDKKLYRLRLGYLGEKVWKDILNFLSIKYIAVGKAVFNFAMDDLQEKDRDIEPGKISENAVNGLTSFDYEQIKADEMLQREVAVNVAFAANNLARVTVDIPQNGEKEDILLWNKSDIKKYKKNSKKGILKSILQFFGGASTWNMKMFEIAYHDQPGDYEENYLYDIIQIIYSLRNKSFHFKTYDHGDKNWNRELIGKMIEHDAERVISVEREKFHSNNLPMFYKDADLKKILDLLYSDYAGRASQVPAFNTVLVRKNFPEFLRKDMGYKVHFNNPEVENQWHSAVYYLYKEIYYNLFLRDKEVKNLFYTSLKNIRSEVSDKKQKLASDDFASRCEEIEDRSLPEICQIIMTEYNAQNFGNRKVKSQRVIEKNKDIFRHYKMLLIKTLAGAFSLYLKQERFAFIGKATPIPYETTDVKNFLPEWKSGMYASFVEEIKNNLDLQEWYIVGRFLNGRMLNQLAGSLRSYIQYAEDIERRAAENRNKLFSKPDEKIEACKKAVRVLDLCIKISTRISAEFTDYFDSEDDYADYLEKYLKYQDDAIKELSGSSYAALDHFCNKDDLKFDIYVNAGQKPILQRNIVMAKLFGPDNILSEVMEKVTESAIREYYDYLKKVSGYRVRGKCSTEKEQEDLLKFQRLKNAVEFRDVTEYAEVINELLGQLISWSYLRERDLLYFQLGFHYMCLKNKSFKPAEYVDIRRNNGTIIHNAILYQIVSMYINGLDFYSCDKEGKTLKPIETGKGVGSKIGQFIKYSQYLYNDPSYKLEIYNAGLEVFENIDEHDNITDLRKYVDHFKYYAYGNKMSLLDLYSEFFDRFFTYDMKYQKNVVNVLENILLRHFVIFYPKFGSGKKDVGIRDCKKERAQIEISEQSLTSEDFMFKLDDKAGEEAKKFPARDERYLQTIAKLLYYPNEIEDMNRFMKKGETINKKVQFNRKKKITRKQKNNSSNEVLSSTMGYLFKNIKL

SEQ ID NO: 89 - protein, 500 aa, Chloroflexus aggregans
MTDQVRREEVAAGELADTPLAAAQTPAADAAVAATPAPAEAVAPTPEQAVDQPATTGESEAPVTTAQAAAHEAEPAEATGASFTPVSEQQPQKPRRLKDLQPGMELEGKVTSIALYGIFVDVGVGRDGLVHISEMSDRRIDTPSELVQIGDTVKVWVKSVDLDARRISLTMLNPSRGEKPRRSRQSQPAQPQPRRQEVDREKLASLKVGEIVEGVITGFAPFGAFADIGVGKDGLIHISELSEGRVEKPEDAVKVGERYQFKVLEIDGEGTRISLSLRRAQRTQRMQQLEPGQIIEGTVSGIATFGAFVDIGVGRDGLVHISALAPHRVAKVEDVVKVGDKVKVKVLGVDPQSKRISLTMRLEEEQPATTAGDEAAEPAEEVTPTRRGNLERFAAAAQTARERSERGERSERGERRERRERRPAQSSPDTYIVGEDDDESFEGNATIEDLLTKFGGSSSRRDRDRRRRHEDDDDEEMERPSNRRQREAIRRTLQQIGYDE

SEQ ID NO: 90 - protein, 249 aa, Demequina aurantiaca
MDLTWHALLILFIVALLAGFLDTLAGGGGLLTVPALLLTGIPPLQALGTNKLQSSFGTGMATYQVIRKKRVHWRDVRWPMVWAFLGSAAGAVAVQFIDTDALLIIIPVVLALVAAYFLFVPKSHLPPPEPRMSDPAYEATLVPIIGAYDGAFGPGTGSLYALSGVALRAKTLVQSTAIAKTLNFATNFAALLVFAFAGHMLWTVGAVMIAGQLIGAYAGSHMLFRVNPLVLRVLIVVMSLGMLIRVLLD

SEQ ID NO: 91 - protein, 1235 aa, Thalassospira sp.
MRIIKPYGRSHVEGVATQEPRRKLRLNSSPDISRDIPGFAQSHDALIIAQWISAIDKIATKPKPDKKPTQAQINLRTTLGDAAWQHVMAENLLPAATDPAIREKLHLIWQSKIAPWGTARPQAEKDGKPTPKGGWYERFCGVLSPEAITQNVARQIAKDIYDHLHVAAKRKGREPAKQGESSNKPGKFKPDRKRGLIEERAESIAKNALRPGSHAPCPWGPDDQATYEQAGDVAGQIYAAARDCLEEKKRRSGNRNTSSVQYLPRDLAAKILYAQYGRVFGPDTTIKAALDEQPSLFALHKAIKDCYHRLINDARKRDILRILPRNMAALFRLVRAQYDNRDINALIRLGKVIHYHASEQGKSEHHGIRDYWPSQQDIQNSRFWGSDGQADIKRHEAFSRIWRHIIALASRTLHDWADPHSQKFSGENDDILLLAKDAIEDDVFKAGHYERKCDVLFGAQASLFCGAEDFEKAILKQAITGTGNLRNATFHFKGKVRFEKELQELTKDVPVEVQSAIAALWQKDAEGRTRQIAETLQAVLAGHFLTEEQNRHIFAALTAAMAQPGDVPLPRLRRVLARHDSICQRGRILPLSPCPDRAKLEESPALTCQYTVLKMLYDGPFRAWLAQQNSTILNHYIDSTIARTDKAARDMNGRKLAQAEKDLITSRAADLPRLSVDEKMGDFLARLTAATATEMRVQRGYQSDGENAQKQAAFIGQFECDVIGRAFADFLNQSGFDFVLKLKADTPQPDAAQCDVTALIAPDDISVSPPQAWQQVLYFILHLVPVDDASHLLHQIRKWQVLEGKEKPAQIAHDVQSVLMLYLDMHDAKFTGGAALHGIEKFAEFFAHAADFRAVFPPQSLQDQDRSIPRRGLREIVRFGHLPLLQHMSGTVQITHDNVVAWQAARTAGATGMSPIARRQKQREELHALAVERTARFRNADLQNYMHALVDVIKHRQLSAQVTLSDQVRLHRLMMGVLGRLVDYAGLWERDLYFVVLALLYHHGATPDDVFKGQGKKNLADGQVVAALKPKNRKAAAPVGVFDDLDHYGIYQDDRQSIRNGLSHFNMLRGGKAPDLSHWVNQTRSLVAHDRKLKNAVAKSVIEMLAREGFDLDWGIQTDRGQHILSHGKIRTRQAQHFQKSRLHIVKKSAKPDKNDTVKIRENLHGDAMVERVVQLFAAQVQKRYDITVEKRLDHLFLKPQDQKGKNGIHTHNGWSKTEKKRRPSRENRKGNHEN

SEQ ID NO: 92 - protein, 1312 aa, Pseudobutyrivibrio sp.
MKFSKESHRKTAVGVTESNGIIGLLYKDPLNEKEKIEDVVNQRANSTKRLFNLFGTEATSKDISRASKDLAKVVNKAIGNLKGNKKFNKKEQITKGLNTKIIVEELKNVLKDEKKLIVNKDIIDEACSRLLKTSFRTAKTKQAVKMILTAVLIENTNLSKEDEAFVHEYFVKKLVNEYNKTSVKKQIPVALSNQNMVIQPNSVNGTLEISETKKSKETKTTEKDAFRAFLRDYATLDENRRHKMRLCLRNLVNLYFYGETSVSKDDFDEWRDHEDKKQNDELFVKKIVSIKTDRKGNVKEVLDVDATIDAIRTNNIACYRRALAYANENPDVFFSDTMLNKFWIHHVENEVERIYGHINNNTGDYKYQLGYLSEKVWKGIINYLSIKYIAEGKAVYNYAMNALAKDNNSNAFGKLDEKFVNGITSFEYERIKAEETLQRECAVNIAFAANHLANATVDLNEKDSDFLLLKHEDNKDTLGAVARPNILRNILQFFGGKSRWNDFDFSGIDEIQLLDDLRKMIYSLRNSSFHFKTENIDNDSWNTKLIGDMFAYDFNMAGNVQKDKMYSNNVPMFYSTSDIEKMLDRLYAEVHERASQVPSFNSVFVRKNFPDYLKNDLKITSAFGVDDALKWQSAVYYVCKEIYYNDFLQNPETFTMLKDYVQCLPIDIDKSMDQKLKSERNAHKNFKEAFATYCKECDSLSAICQMIMTEYNNQNKGNRKVISARTKDGDKLIYKHYKMILFEALKNVFTIYLEKNINTYGFLKKPKLINNVPAIEEFLPNYNGRQYETLVNRITEETELQKWYIVGRLLNPKQVNQLIGNFRSYVQYVNDVARRAKQTGNNLSNDNIAWDVKNIIQIFDVCTKLNGVTSNILEDYFDDGDDYARYLKNFVDYTNKNNDHSATLLGDFCAKEIDGIKIGIYHDGTNPIVNRNIIQCKLYGATGIISDLTKDGSILSVDYEIIKKYMQMQKEIKVYQQKGICKTKEEQQNLKKYQELKNIVELRNIIDYSEILDELQGQLINWGYLRERDLMYFQLGFHYLCLHNESKKPVGYNNAGDISGAVLYQIVAMYTNGLSLIDANGKSKKNAKASAGAKVGSFCSYSKEIRGVDKDTKEDDDPIYLAGVELFENINEHQQCINLRNYIEHFHYYAKHDRSMLDLYSEVFDRFFTYDMKYTKNVPNMMYNILLQHLVVPAFEFGSSEKRLDDNDEQTKPRAMFTLREKNGLSSEQFTYRLGDGNSTVKLSARGDDYLRAVASLLYYPDRAPEGLIRDAEAEDKFAKINHSNPKSDNRNNRGNFKNPKVQWYNNKTKRK

SEQ ID NO: 93 - protein, 1343 aa, Butyrivibrio sp.
MKISKVDHRKTAVKITDNKGAEGFIYQDPTRDSSTMEQIISNRARSSKVLFNIFGDTKKSKDLNKYTESLIIYVNKAIKSLKGDKRNNKYEEITESLKTERVLNALIQAGNEFTCSENNIEDALNKYLKKSFRVGNTKSALKKLLMAAYCGYKLSIEEKEEIQNYFVDKLVKEYNKDTVLKYTAKSLKHQNMVVQPDTDNHVFLPSRIAGATQNKMSEKEALTEFLKAYAVLDEEKRHNLRIILRKLVNLYFYESPDFIYPENNEWKEHDDRKNKTETFVSPVKVNEEKNGKTFVKIDVPATKDLIRLKNIECYRRSVAETAGNPITYFTDHNISKFWIHHIENEVEKIFALLKSNWKDYQFSVGYISEKVWKEIINYLSIKYIAIGKAVYNYALEDIKKNDGTLNFGVIDPSFYDGINSFEYEKIKAEETFQREVAVYVSFAVNHLSSATVKLSEAQSDMLVLNKNDIEKIAYGNTKRNILQFFGGQSKWKEFDFDRYINPVNYTDIDFLFDIKKMVYSLRNESFHFTTTDTESDWNKNLISAMFEYECRRISTVQKNKFFSNNLPLFYGENSLERVLHKLYDDYVDRMSQVPSFGNVFVRKKFPDYMKEIGIKHNLSSEDNLKLQGALYFLYKEIYYNAFISSEKAMKIFVDLVNKLDTNARDDKGRITHEAMAHKNFKDAISHYMTHDCSLADICQKIMTEYNQQNTGHRKKQTTYSSEKNPEIFRHYKMILFMLLQKAMTEYISSEEIFDFIMKPNSPKTDIKEEEFLPQYKSCAYDNLIKLIADNVELQKWYITARLLSPREVNQLIGSFRSYKQFVSDIERRAKETNNSLSKSGMTVDVENITKVLDLCTKLNGRFSNELTDYFDSKDDYAVYVSKFLDFGFKIDEKFPAALLGEFCNKEENGKKIGIYHNGTEPILNSNIIKSKLYGITDVVSRAVKPVSEKLIREYLQQEVKIKPYLENGVCKNKEEQAALRKYQELKNRIEFRDIVEYSEIINELMGQLINFSYLRERDLMYFQLGFHYLCLNNYGAKPEGYYSIVNDKRTIKGAILYQIVAMYTYGLPIYHYVDGTISDRRKNKKTVLDTLNSSETVGAKIKYFIYYSDELFNDSLILYNAGLELFENINEHENIVNLRKYIDHFKYYVSQDRSLLDIYSEVFDRYFTYDRKYKKNVMNLFSNIMLKHFIITDFEFSTGEKTIGEKNTAKKECAKVRIKRGGLSSDKFTYKFKDAKPIELSAKNTEFLDGVARILYYPENVVLTDLVRNSEVEDEKRIEKYDRNHNSSPTRKDKTYKQDVKKNYNKKTSKAFDSSKLDTKSVGNNLSDNPVLKQFLSESKKKR

SEQ ID NO: 94 - protein, 1276 aa, Blautia sp.; identical to SEQ ID NO: 86

SEQ ID NO: 95 - protein, 1168 aa, Leptotrichia sp.
MKITKIDGISHKKYIKEGKLVKSTSEENKTDERLSELLTIRLDTYIKNPDNASEEENRIRRENLKEFFSNKVLYLKDGILYLKDRREKNQLQNKNYSEEDISEYDLKNKNNFLVLKKILLNEDINSEELEIFRNDFEKKLDKINSLKYSLEENKANYQKINENNIKKVEGKSKRNIFYNYYKDSAKRNDYINNIQEAFDKLYKKEDIENLFFLIENSKKHEKYKIRECYHKIIGRKNDKENFATIIYEEIQNVNNMKELIEKVPNVSELKKSQVFYKYYLNKEKLNDENIKYVFCHFVEIEMSKLLKNYVYKKPSNISNDKVKRIFEYQSLKKLIENKLLNKLDTYVRNCGKYSFYLQDGEIATSDFIVGNRQNEAFLRNIIGVSSTAYFSLRNILETENENDITGRMRGKTVKNNKGEEKYISGEIDKLYDNNKQNEVKKNLKMFYSYDFNMNSKKEIEDFFSNIDEAISSIRHGIVHFNLELEGKDIFTFKNIVPSQISKKMFHDEINEKKLKLKIFKQLNSANVFRYLEKYKILNYLNRTRFEFVNKNIPFVPSFTKLYSRIDDLKNSLGIYWKTPKTNDDNKTKEITDAQIYLLKNIYYGEFLNYFMSNNGNFFEITKEIIELNKNDKRNLKTGFYKLQKFENLQEKTPKEYLANIQSLYMINAGNQDEEEKDTYIDFIQKIFLKGFMTYLANNGRLSLIYIGSDEETNTSLAEKKQEFDKFLKKYEQNNNIEIPYEINEFVREIKLGKILKYTERLNMFYLILKLLNHKELTNLKGSLEKYQSANKEEAFSDQLELINLLNLDNNRVTEDFELEADEIGKFLDFNGNKVKDNKELKKFDTNKIYFDGENIIKHRAFYNIKKYGMLNLLEKISDEAKYKISIEELKNYSKKKNEIEENHTTQENLHRKYARPRKDEKFTDEDYKKYEKAIRNIQQYTHLKNKVEFNELNLLQSLLLRILHRLVGYTSIWERDLRFRLKGEFPENQYIEEIFNFDNSKNVKYKNGQIVEKYINFYKELYKDDTEKISIYSDKKVKELKKEKKDLYIRNYIAHFNYIPNAEISLLEMLENLRKLLSYDRKLKNAIMKSIVDILKEYGFVVTFKIEKDKKIRIESLKSEEVVHLKKLKLKDNDKKKEPIKTYRNSKELCKLVKVMFEYKMKEKKSEN

SEQ ID NO: 96 - protein, 1138 aa, Bacteroides ihuae
MRITKVKVKESSDQKDKMVLIHRKVGEGTLVLDENLADLTAPIIDKYKDKSFELSLLKQTLVSEKEMNIPKCDKCTAKERCLSCKQREKRLKEVRGAIEKTIGAVIAGRDIIPRLNIFNEDEICWLIKPKLRNEFTFKDVNKQVVKLNLPKVLVEYSKKNDPTLFLAYQQWIAAYLKNKKGHIKKSILNNRVVIDYSDESKLSKRKQALELWGEEYETNQRIALESYHTSYNIGELVTLLPNPEEYVSDKGEIRPAFHYKLKNVLQMHQSTVFGTNEILCINPIFNENRANIQLSAYNLEVVKYFEHYFPIKKKKKNLSLNQAIYYLKVETLKERLSLQLENALRMNLLQKGKIKKHEFDKNTCSNTLSQIKRDEFFVLNLVEMCAFAANNIRNIVDKEQVNEILSKKDLCNSLSKNTIDKELCTKFYGADFSQIPVAIWAMRGSVQQIRNEIVHYKAEAIDKIFALKTFEYDDMEKDYSDTPFKQYLELSIEKIDSFFIEQLSSNDVLNYYCTEDVNKLLNKCKLSLRRTSIPFAPGFKTIYELGCHLQDSSNTYRIGHYLMLIGGRVANSTVTKASKAYPAYRFMLKLIYNHLFLNKFLDNHNKRFFMKAVAFVLKDNRENARNKFQYAFKEIRMMNNDESIASYMSYIHSLSVQEQEKKGDKNDKVRYNTEKFIEKVFVKGFDDFLSWLGVEFILSPNQEERDKTVTREEYENLMIKDRVEHSINSNQESHIAFFTFCKLLDANHLSDLRNEWIKFRSSGDKEGFSYNFAIDIIELCLLTVDRVEQRRDGYKEQTELKEYLSFFIKGNESENTVWKGFYFQQDNYTPVLYSPIELIRKYGTLELLKLIIVDEDKITQGEFEEWQTLKKVVEDKVTRRNELHQEWEDMKNKSSFSQEKCSIYQKLCRDIDRYNWLDNKLHLVHLRKLHNLVIQILSRMARFIALWDRDFVLLDASRANDDYKLLSFFNFRDFINAKKTKTDDELLAEFGSKIEKKNAPFIKAEDVPLMVECIEAKRSFYQKVFFRNNLQVLADRNFIAHYNYISKTAKCSLFEMIIKLRTLMYYDRKLRNAVVKSIANVFDQNGMVLQLSLDDSHELKVDKVISKRIVHLKNNNIMTDQVPEEYYKICRRLLEMKK

SEQ ID NO: 97 - protein, 697 aa, Porphyromonadaceae bacterium
MEFRDSIFKSLLQKEIEKAPLCFAEKLISGGVFSYYPSERLKEFVGNHPFSLFRKTMPFSPGFKRVMKSGGNYQNANRDGRFYDLDIGVYLPKDGFGDEEWNARYFLMKLIYNQLFLPYFADAENHLFRECVDFVKRVNRDYNCKNNNSEEQAFIDIRSMREDESIADYLAFIQSNIIIEENKKKETNKEGQINFNKFLLQVFVKGFDSFLKDRTELNFLQLPELQGDGTRGDDLESLDKLGAVVAVDLKLDATGIDADLNENISFYTFCKLLDSNHLSRLRNEIIKYQSANSDFSHNEDFDYDRIISIIELCMLSADHVSTNDNESIFPNNDKDFSGIRPYLSTDAKVETFEDLYVHSDAKTPITNATMVLNWKYGTDKLFERLMISDQDFLVTEKDYFVWKELKKDIEEKIKLREELHSLWVNTPKGKKGAKKKNGRETTGEFSEENKKEYLEVCREIDRYVNLDNKLHFVHLKRMHSLLIELLGRFVGFTYLFERDYQYYHLEIRSRRNKDAGVVDKLEYNKIKDQNKYDKDDFFACTFLYEKANKVRNFIAHFNYLTMWNSPQEEEHNSNLSGAKNSSGRQNLKCSLTELINELREVMSYDRKLKNAVTKAVIDLFDKHGMVIKFRIVNNNNNDNKNKHHLELDDIVPKKIMHLRGIKLKRQDGKPIPIQTDSVDPLYCRMWKKLLDLKPTPF

SEQ ID NO: 98 - protein, 204 aa, Listeria riparia
MHDAWAENPKKPQSDAFLKEYKACCEAIDTYNWHKNKATLVYVNELHHLLIDILGRLVGYVAIADRDFQCMANQYLKSSGHTERVDSWINTIRKNRPDYIEKLDIFMNKAGLFVSEKNGRNYIAHLNYLSPKHKYSLLYLFEKLREMLKYDRKLKNAVTKSLIDLLDKHGMCVVFANLKNNKHRLVIASLKPKKIETFKWKKIK

SEQ ID NO: 99 - protein, 1082 aa, Insolitispirillum peregrinum
MRIIRPYGSSTVASPSPQDAQPLRSLQRQNGTFDVAEFSRRHPELVLAQWVAMLDKIIRKPAPGKNSTALPRPTAEQRRLRQQVGAALWAEMQRHTPVPPELKAVWDSKVHPYSKDNAPATAKTPSHRGRWYDRFGDPETSAATVAEGVRRHLLDSAQPFRANGGQPKGKGVIEHRALTIQNGTLLHHHQSEKAGPLPEDWSTYRADELVSTIGKDARWIKVAASLYQHYGRIFGPTTPISEAQTRPEFVLHTAVKAYYRRLFKERKLPAERLERLLPRTGEALRHAVTVQHGNRSLADAVRIGKILHYGWLQNGEPDPWPDDAALYSSRYWGSDGQTDIKHSEAVSRVWRRALTAAQRTLTSWLYPAGTDAGDILLIGQKPDSIDRNRLPLLYGDSTRHWTRSPGDVWLFLKQTLENLRNSSFHFKTLSAFTSHLDGTCESEPAEQQAAQALWQDDRQQDHQQVFLSLRALDATTYLPTGPLHRIVNAVQSTDATLPLPRFRRVVTRAANTRLKGFPVEPVNRRTMEDDPLLRCRYGVLKLLYERGFRAWLETRPSIASCLDQSLKRSTKAAQTINGKNSPQGVEILSRATKLLQAEGGGGHGIHDLFDRLYAATAREMRVQVGYHHDAEAARQQAEFIEDLKCEVVARAFCAYLKTLGIQGDTFRRQPEPLPTWPDLPDLPSSTIGTAQAALYSVLHLMPVEDVGSLLHQLRRWLVALQARGGEDGTAITATIPLLELYLNRHDAKFSGGGAGTGLRWDDWQVFFDCQATFDRVFPPGPALDSHRLPLRGLREVLRFGRVNDLAALIGQDKITAAEVDRWHTAEQTIAAQQQRREALHEQLSRKKGTDAEVDEYRALVTAIADHRHLTAHVTLSNVVRLHRLMTTVLGRLVDYGGLWERDLTFVTLYEAHRLGGLRNLLSESRVNKFLDGQTPAALSKKNNAEENGMISKVLGDKARRQIRNDFAHFNMLQQGKKTINLTDEINNARKLMAHDRKLKNAITRSVTTLLQQDGLDIVWTMDASHRLTDAKIDSRNAIHLHKTHNRANIREPLHGKSYCRWVAALFGATSTPSATKKSDKIR

SEQ ID NO: 100 - protein, 1224 aa, Insolitispirillum peregrinum
MENKTSLGNNIYYNPFKPQDKSYFAGYFNAAMENTDSVFRELGKRLKGKEYTSENFFDAIFKENISLVEYERYVKLLSDYFPMARLLDKKEVPIKERKENFKKNFKGIIKAVRDLRNFYTHKEHGEVEITDEIFGVLDEMLKSTVLTVKKKKVKTDKTKEILKKSIEKQLDILCQKKLEYLRDTARKIEEKRRNQRERGEKELVAPFKYSDKRDDLIAAIYNDAFDVYIDKKKDSLKESSKAKYNTKSDPQQEEGDLKIPISKNGVVFLLSLFLTKQEIHAFKSKIAGFKATVIDEATVSEATVSHGKNSICFMATHEIFSHLAYKKLKRKVRTAEINYGEAENAEQLSVYAKETLMMQMLDELSKVPDVVYQNLSEDVQKTFIEDWNEYLKENNGDVGTMEEEQVIHPVIRKRYEDKFNYFAIRFLDEFAQFPTLRFQVHLGNYLHDSRPKENLISDRRIKEKITVFGRLSELEHKKALFIKNTETNEDREHYWEIFPNPNYDFPKENISVNDKDFPIAGSILDREKQPVAGKIGIKVKLLNQQYVSEVDKAVKAHQLKQRKASKPSIQNIIEEIVPINESNPKEAIVFGGQPTAYLSMNDIHSILYEFFDKWEKKKEKLEKKGEKELRKEIGKELEKKIVGKIQAQIQQIIDKDTNAKILKPYQDGNSTAIDKEKLIKDLKQEQNILQKLKDEQTVREKEYNDFIAYQDKNREINKVRDRNHKQYLKDNLKRKYPEAPARKEVLYYREKGKVAVWLANDIKRFMPTDFKNEWKGEQHSLLQKSLAYYEQCKEELKNLLPEKVFQHLPFKLGGYFQQKYLYQFYTCYLDKRLEYISGLVQQAENFKSENKVFKKVENECFKFLKKQNYTHKELDARVQSILGYPIFLERGFMDEKPTIIKGKTFKGNEALFADWFRYYKEYQNFQTFYDTENYPLVELEKKQADRKRKTKIYQQKKNDVFTLLMAKHIFKSVFKQDSIDQFSLEDLYQSREERLGNQERARQTGERNTNYIWNKTVDLKLCDGKITVENVKLKNVGDFIKYEYDQRVQAFLKYEENIEWQAFLIKESKEEENYPYVVEREIEQYEKVRREELLKEVHLIEEYILEKVKDKEILKKGDNQNFKYYILNGLLKQLKNEDVESYKVFNLNTEPEDVNINQLKQEATDLEQKAFVLTYIRNKFAHNQLPKKEFWDYCQEKYGKIEKEKTYAEYFAEVFKKEKEALIK

SEQ ID NO: 101 - protein, 1126 aa, Prevotella intermedia
MEDDKKTTDSIRYELKDKHFWAAFLNLARHNVYITVNHINKILEEGEINRDGYETTLKNTWNEIKDINKKDRLSKLIIKHFPFLEAATYRLNPTDTTKQKEEKQAEAQSLESLRKSFFVFIYKLRDLRNHYSHYKHSKSLERPKFEEGLLEKMYNIFNASIRLVKEDYQYNKDINPDEDFKHLDRTEEEFNYYFTKDNEGNITESGLLFFVSLFLEKKDAIWMQQKLRGFKDNRENKKKMTNEVFCRSRMLLPKLRLQSTQTQDWILLDMLNELIRCPKSLYERLREEDREKFRVPIEIADEDYDAEQEPFKNTLVRHQDRFPYFALRYFDYNEIFTNLRFQIDLGTYHFSIYKKQIGDYKESHHLTHKLYGFERIQEFTKQNRPDEWRKFVKTFNSFETSKEPYIPETTPHYHLENQKIGIRFRNDNDKIWPSLKTNSEKNEKSKYKLDKSFQAEAFLSVHELLPMMFYYLLLKTENTDNDNEIETKKKENKNDKQEKHKIEEIIENKITEIYALYDTFANGEIKSIDELEEYCKGKDIEIGHLPKQMIAILKDEHKVMATEAERKQEEMLVDVQKSLESLDNQINEEIENVERKNSSLKSGKIASWLVNDMMRFQPVQKDNEGKPLNNSKANSTEYQLLQRTLAFFGSEHERLAPYFKQTKLIESSNPHPFLKDTEWEKCNNILSFYRSYLEAKKNFLESLKPEDWEKNQYFLKLKEPKTKPKTLVQGWKNGFNLPRGIFTEPIRKWFMKHRENITVAELKRVGLVAKVIPLFFSEEYKDSVQPFYNYHFNVGNINKPDEKNFLNCEERRELLRKKKDEFKKMTDKEKEENPSYLEFKSWNKFERELRLVRNQDIVTWLLCMELFNKKKIKELNVEKIYLKNINTNTTKKEKNTEEKNGEEKNIKEKNNILNRIMPMRLPIKVYGRENFSKNKKKKIRRNTFFTVYIEEKGTKLLKQGNFKALERDRRLGGLFSFVKTPSKAESKSNTISKLRVEYELGEYQKARIEIIKDMLALEKTLIDKYNSLDTDNFNKMLTDWLELKGEPDKASFQNDVDLLIAVRNAFSHNQYPMRNRIAFANINPFSLSSANTSEEKGLGIANQLKDKTHKTIEKIIEIEKPIETKE

SEQ ID NO: 102 - protein, 1127 aa, Prevotella buccae
MQKQDKLFVDRKKNAIFAFPKYITIMENKEKPEPIYYELTDKHFWAAFLNLARHNVYTTINHINRRLEIAELKDDGYMMGIKGSWNEQAKKLDKKVRLRDLIMKHFPFLEAAAYEMTNSKSPNNKEQREKEQSEALSLNNLKNVLFIFLEKLQVLRNYYSHYKYSEESPKPIFETSLLKNMYKVFDANVRLVKRDYMHHENIDMQRDFTHLNRKKQVGRTKNIIDSPNFHYHFADKEGNMTIAGLLFFVSLFLDKKDAIWMQKKLKGFKDGRNLREQMTNEVFCRSRISLPKLKLENVQTKDWMQLDMLNELVRCPKSLYERLREKDRESFKVPFDIFSDDYNAEEEPFKNTLVRHQDRFPYFVLRYFDLNEIFEQLRFQIDLGTYHFSIYNKRIGDEDEVRHLTHHLYGFARIQDFAPQNQPEEWRKLVKDLDHFETSQEPYISKTAPHYHLENEKIGIKFCSAHNNLFPSLQTDKTCNGRSKFNLGTQFTAEAFLSVHELLPMMFYYLLLTKDYSRKESADKVEGIIRKEISNIYAIYDAFANNEINSIADLTRRLQNTNILQGHLPKQMISILKGRQKDMGKEAERKIGEMIDDTQRRLDLLCKQTNQKIRIGKRNAGLLKSGKIADWLVNDMMRFQPVQKDQNNIPINNSKANSTEYRMLQRALALFGSENFRLKAYFNQMNLVGNDNPHPFLAETQWEHQTNILSFYRNYLEARKKYLKGLKPQNWKQYQHFLILKVQKTNRNTLVTGWKNSFNLPRGIFTQPIREWFEKHNNSKRIYDQILSFDRVGFVAKAIPLYFAEEYKDNVQPFYDYPFNIGNRLKPKKRQFLDKKERVELWQKNKELFKNYPSEKKKTDLAYLDFLSWKKFERELRLIKNQDIVTWLMFKELFNMATVEGLKIGEIHLRDIDTNTANEESNNILNRIMPMKLPVKTYETDNKGNILKERPLATFYIEETETKVLKQGNFKALVKDRRLNGLFSFAETTDLNLEEHPISKLSVDLELIKYQTTRISIFEMTLGLEKKLIDKYSTLPTDSFRNMLERWLQCKANRPELKNYVNSLIAVRNAFSHNQYPMYDATLFAEVKKFTLFPSVDTKKIELNIAPQLLEIVGKAIKEIEKSENKN

SEQ ID NO: 103 - protein, 1135 aa, Porphyromonas gingivalis
MNTVPASENKGQSRTVEDDPQYFGLYLNLARENLIEVESHVRIKFGKKKLNEESLKQSLLCDHLLSVDRWTKVYGHSRRYLPFLHYFDPDSQIEKDHDSKTGVDPDSAQRLIRELYSLLDFLRNDFSHNRLDGTTFEHLEVSPDISSFITGTYSLACGRAQSRFAVFFKPDDFVLAKNRKEQLISVADGKECLTVSGFAFFICLFLDREQASGMLSRIRGFKRTDENWARAVHETFCDLCIRHPHDRLESSNTKEALLLDMLNELNRCPRILYDMLPEEERAQFLPALDENSMNNLSENSLDEESRLLWDGSSDWAEALTKRIRHQDRFPYLMLRFIEEMDLLKGIRFRVDLGEIELDSYSKKVGRNGEYDRTITDHALAFGKLSDFQNEEEVSRMISGEASYPVRFSLFAPRYAIYDNKIGYCHTSDPVYPKSKTGEKRALSNPQSMGFISVHDLRKLLLMELLCEGSFSRMQSDFLRKANRILDETAEGKLQFSALFPEMRHRFIPPQNPKSKDRREKAETTLEKYKQEIKGRKDKLNSQLLSAFDMDQRQLPSRLLDEWMNIRPASHSVKLRTYVKQLNEDCRLRLRKFRKDGDGKARAIPLVGEMATFLSQDIVRMIISEETKKLITSAYYNEMQRSLAQYAGEENRRQFRAIVAELRLLDPSSGHPFLSATMETAHRYTEGFYKCYLEKKREWLAKIFYRPEQDENTKRRISVFFVPDGEARKLLPLLIRRRMKEQNDLQDWIRNKQAHPIDLPSHLFDSKVMELLKVKDGKKKWNEAFKDWWSTKYPDGMQPFYGLRRELNIHGKSVSYIPSDGKKFADCYTHLMEKTVRDKKRELRTAGKPVPPDLAADIKRSFHRAVNEREFMLRLVQEDDRLMLMAINKMMTDREEDILPGLKNIDSILDEENQFSLAVHAKVLEKEGEGGDNSLSLVPATIEIKSKRKDWSKYIRYRYDRRVPGLMSHFPEHKATLDEVKTLLGEYDRCRIKIFDWAFALEGAIMSDRDLKPYLHESSSREGKSGEHSTLVKMLVEKKGCLTPDESQYLILIRNKAAHNQFPCAAEMPLIYRDVSAKVGSIEGSSAKDLPEGSSLVDSLWKKYEMIIRKILPILDPENRFFGKLLNNMSQPINDL

SEQ ID NO: 104 - protein, 1115 aa, Bacteroides pyogenes
MESIKNSQKSTGKTLQKDPPYFGLYLNMALLNVRKVENHIRKWLGDVALLPEKSGFHSLLTTDNLSSAKWTRFYYKSRKFLPFLEMFDSDKKSYENRRETAECLDTIDRQKISSLLKEVYGKLQDIRNAFSHYHIDDQSVKHTALIISSEMHRFIENAYSFALQKTRARFTGVFVETDFLQAEEKGDNKKFFAIGGNEGIKLKDNALIFLICLFLDREEAFKFLSRATGFKSTKEKGFLAVRETFCALCCRQPHERLLSVNPREALLMDMLNELNRCPDILFEMLDEKDQKSFLPLLGEEEQAHILENSLNDELCEAIDDPFEMIASLSKRVRYKNRFPYLMLRYIEEKNLLPFIRFRIDLGCLELASYPKKMGEENNYERSVTDHAMAFGRLTDFHNEDAVLQQITKGITDEVRFSLYAPRYAIYNNKIGFVRTSGSDKISFPTLKKKGGEGHCVAYTLQNTKSFGFISIYDLRKILLLSFLDKDKAKNIVSGLLEQCEKHWKDLSENLFDAIRTELQKEFPVPLIRYTLPRSKGGKLVSSKLADKQEKYESEFERRKEKLTEILSEKDFDLSQIPRRMIDEWLNVLPTSREKKLKGYVETLKLDCRERLRVFEKREKGEHPLPPRIGEMATDLAKDIIRMVIDQGVKQRITSAYYSEIQRCLAQYAGDDNRRHLDSIIRELRLKDTKNGHPFLGKVLRPGLGHTEKLYQRYFEEKKEWLEATFYPAASPKRVPRFVNPPTGKQKELPLIIRNLMKERPEWRDWKQRKNSHPIDLPSQLFENEICRLLKDKIGKEPSGKLKWNEMFKLYWDKEFPNGMQRFYRCKRRVEVFDKVVEYEYSEEGGNYKKYYEALIDEVVRQKISSSKEKSKLQVEDLTLSVRRVFKRAINEKEYQLRLLCEDDRLLFMAVRDLYDWKEAQLDLDKIDNMLGEPVSVSQVIQLEGGQPDAVIKAECKLKDVSKLMRYCYDGRVKGLMPYFANHEATQEQVEMELRHYEDHRRRVFNWVFALEKSVLKNEKLRRFYEESQGGCEHRRCIDALRKASLVSEEEYEFLVHIRNKSAHNQFPDLEIGKLPPNVTSGFCECIWSKYKAIICRIIPFIDPERRFFGKLLEQK

SEQ ID NO: 105 - protein, 953 aa, Alistipes sp.
MSNEIGAFREHQFAYAPGNEKQEEATFATYFNLALSNVEGMMFGEVESNPDKIEKSLDTLPPAILRQIASFIWLSKEDHPDKAYSTEEVKVIVTDLVRRLCFYRNYFSHCFYLDTQYFYSDELVDTTAIGEKLPYNFHHFITNRLFRYSLPEITLFRWNEGERKYEILRDGLIFFCCLFLKRGQAERFLNELRFFKRTDEEGRIKRTIFTKYCTRESHKHIGIEEQDFLIFQDIIGDLNRVPKVCDGVVDLSKENERYIKNRETSNESDENKARYRLLIREKDKFPYYLMRYIVDFGVLPCITFKQNDYSTKEGRGQFHYQDAAVAQEERCYNFVVRNGNVYYSYMPQAQNVVRISELQGTISVEELRNMVYASINGKDVNKSVEQYLYHLHLLYEKILTISGQTIKEGRVDVEDYRPLLDKLLLRPASNGEELRRELRKLLPKRVCDLLSNRFDCSEGVSAVEKRLKAILLRHEQLLLSQNPALHIDKIKSVIDYLYLFFSDDEKFRQQPTEKAHRGLKDEEFQMYHYLVGDYDSHPLALWKELEASGRLKPEMRKLTSATSLHGLYMLCLKGTVEWCRKQLMSIGKGTAKVEAIADRVGLKLYDKLKEYTPEQLEREVKLVVMHGYAAAATPKPKAQAAIPSKLTELRFYSFLGKREMSFAAFIRQDKKAQKLWLRNFYTVENIKTLQKRQAAADAACKKLYNLVGEVERVHTNDKVLVLVAQRYRERLLNVGSKCAVTLDNPERQQKLADVYEVQNAWLSIRFDDLDFTLTHVNLSNLRKAYNLIPRKHILAFKEYLDNRVKQKLCEECRNVRRKEDLCTCCSPRYSNLTSWLKENHSESSIEREAATMMLLDVERKLLSFLLDERRKAIIEYGKFIPFSALVKECRLADAGLCGIRNDVLHDNVISYADAIGKLSAYFPKEASEAVEYIRRTKEVREQRREELMANSSQ

SEQ ID NO: 106 - protein, 1322 aa, Prevotella sp.
MSKECKKQRQEKKRRLQKANFSISLTGKHVFGAYFNMARTNFVKTINYILPIAGVRGNYSENQINKMLHALFLIQAGRNEELTTEQKQWEKKLRLNPEQQTKFQKLLFKHFPVLGPMMADVADHKAYLNKKKSTVQTEDETFAMLKGVSLADCLDIICLMADTLTECRNFYTHKDPYNKPSQLADQYLHQEMIAKKLDKVVVASRRILKDREGLSVNEVEFLTGIDHLHQEVLKDEFGNAKVKDGKVMKTFVEYDDFYFKISGKRLVNGYTVTTKDDKPVNVNTMLPALSDFGLLYFCVLFLSKPYAKLFIDEVRLFEYSPFDDKENMIMSEMLSIYRIRTPRLHKIDSHDSKATLAMDIFGELRRCPMELYNLLDKNAGQPFFHDEVKHPNSHTPDVSKRLRYDDRFPTLALRYIDETELFKRIRFQLQLGSFRYKFYDKENCIDGRVRVRRIQKEINGYGRMQEVADKRMDKWGDLIQKREERSVKLEHEELYINLDQFLEDTADSTPYVTDRRPAYNIHANRIGLYWEDSQNPKQYKVFDENGMYIPELVVTEDKKAPIKMPAPRCALSVYDLPAMLFYEYLREQQDNEFPSAEQVIIEYEDDYRKFFKAVAEGKLKPFKRPKEFRDFLKKEYPKLRMADIPKKLQLFLCSHGLCYNNKPETVYERLDRLTLQHLEERELHIQNRLEHYQKDRDMIGNKDNQYGKKSFSDVRHGALARYLAQSMMEWQPTKLKDKEKGHDKLTGLNYNVLTAYLATYGHPQVPEEGFTPRTLEQVLINAHLIGGSNPHPFINKVLALGNRNIEELYLHYLEEELKHIRSRIQSLSSNPSDKALSALPFIHHDRMRYHERTSEEMMALAARYTTIQLPDGLFTPYILEILQKHYTENSDLQNALSQDVPVKLNPTCNAAYLITLFYQTVLKDNAQPFYLSDKTYTRNKDGEKAESFSFKRAYELFSVLNNNKKDTFPFEMIPLFLTSDEIQERLSAKLLDGDGNPVPEVGEKGKPATDSQGNTIWKRRIYSEVDDYAEKLTDRDMKISFKGEWEKLPRWKQDKIIKRRDETRRQMRDELLQRMPRYIRDIKDNERTLRRYKTQDMVLFLLAEKMFTNIISEQSSEFNWKQMRLSKVCNEAFLRQTLTFRVPVTVGETTIYVEQENMSLKNYGEFYRFLTDDRLMSLLNNIVETLKPNENGDLVIRHTDLMSELAAYDQYRSTIFMLIQSIENLIITNNAVLDDPDADGFWVREDLPKRNNFASLLELINQLNNVELTDDERKLLVAIRNAFSHNSYNIDFSLIKDVKHLPEVAKGILQHLQSMLGVEITK

SEQ ID NO: 107 - protein, 1322 aa, Prevotella sp.; identical to SEQ ID NO: 106

SEQ ID NO: 108 - protein, 1095 aa, Riemerella anatipestifer
MEKPLLPNVYTLKHKFFWGAFLNIARHNAFITICHINEQLGLKTPSNDDKIVDVVCETWNNILNNDHDLLKKSQLTELILKHFPFLTAMCYHPPKKEGKKKGHQKEQQKEKESEAQSQAEALNPSKLIEALEILVNQLHSLRNYYSHYKHKKPDAEKDIFKHLYKAFDASLRMVKEDYKAHFTVNLTRDFAHLNRKGKNKQDNPDFNRYRFEKDGFFTESGLLFFTNLFLDKRDAYWMLKKVSGFKASHKQREKMTTEVFCRSRILLPKLRLESRYDHNQMLLDMLSELSRCPKLLYEKLSEENKKHFQVEADGFLDEIEEEQNPFKDTLIRHQDRFPYFALRYLDLNESFKSIRFQVDLGTYHYCIYDKKIGDEQEKRHLTRTLLSFGRLQDFTEINRPQEWKALTKDLDYKETSNQPFISKTTPHYHITDNKIGFRLGTSKELYPSLEIKDGANRIAKYPYNSGFVAHAFISVHELLPLMFYQHLTGKSEDLLKETVRHIQRIYKDFEEERINTIEDLEKANQGRLPLGAFPKQMLGLLQNKQPDLSEKAKIKIEKLIAETKLLSHRLNTKLKSSPKLGKRREKLIKTGVLADWLVKDFMRFQPVAYDAQNQPIKSSKANSTEFWFIRRALALYGGEKNRLEGYFKQTNLIGNTNPHPFLNKFNWKACRNLVDFYQQYLEQREKFLEAIKNQPWEPYQYCLLLKIPKENRKNLVKGWEQGGISLPRGLFTEAIRETLSEDLMLSKPIRKEIKKHGRVGFISRAITLYFKEKYQDKHQSFYNLSYKLEAKAPLLKREEHYEYWQQNKPQSPTESQRLELHTSDRWKDYLLYKRWQHLEKKLRLYRNQDVMLWLMTLELTKNHFKELNLNYHQLKLENLAVNVQEADAKLNPLNQTLPMVLPVKVYPATAFGEVQYHKTPIRTVYIREEHTKALKMGNFKALVKDRRLNGLFSFIKEENDTQKHPISQLRLRRELEIYQSLRVDAFKETLSLEEKLLNKHTSLSSLENEFRALLEEWKKEYAASSMVTDEHIAFIASVRNAFCHNQYPFYKEALHAPIPLFTVAQPTTEEKDGLGIAEALLKVLREYCEIVKSQI

SEQ ID NO: 109 - protein, 1124 aa, Prevotella aurantiaca
MEDDKKTTGSISYELKDKHFWAAFLNLARHNVYITINHINKLLEIREIDNDEKVLDIKTLWQKGNKDLNQKARLRELMTKHFPFLETAIYTKNKEDKKEVKQEKQAEAQSLESLKDCLFLFLDKLQEARNYYSHYKYSEFSKEPEFEEGLLEKMYNIFGNNIQLVINDYQHNKDINPDEDFKHLDRKGQFKYSFADNEGNITESGLLFFVSLFLEKKDAIWMQQKLNGFKDNLENKKKMTHEVFCRSRILMPKLRLESTQTQDWILLDMLNELIRCPKSLYERLQGDDREKFKVPFDPADEDYNAEQEPFKNTLIRHQDRFPYFVLRYFDYNEIFKNLRFQIDLGTYHFSIYKKLIGGQKEDRHLTHKLYGFERIQEFAKQNRPDEWKAIVKDLDTYETSNKRYISETTPHYHLENQKIGIRFRNGNKEIWPSLKTNDENNEKSKYKLDKQYQAEAFLSVHELLPMMFYYLLLKKEKPNNDEINASIVEGFIKREIRNIFKLYDAFANGEINNIDDLEKYCADKGIPKRHLPKQMVAILYDEHKDMVKEAKRKQKEMVKDTKKLLATLEKQTQKEKEDDGRNVKLLKSGEIARWLVNDMMRFQPVQKDNEGKPLNNSKANSTEYQMLQRSLALYNNEEKPTRYFRQVNLIESNNPHPFLKWTKWEECNNILTFYYSYLTKKIEFLNKLKPEDWKKNQYFLKLKEPKTNRETLVQGWKNGFNLPRGIFTEPIREWFKRHQNNSKEYEKVEALDRVGLVTKVIPLFFKEEYFKDKEENFKEDTQKEINDCVQPFYNFPYNVGNIHKPKEKDFLHREERIELWDKKKDKFKGYKEKIKSKKLTEKDKEEFRSYLEFQSWNKFERELRLVRNQDIVTWLLCKELIDKLKIDELNIEELKKLRLNNIDTDTAKKEKNNILNRVMPMELPVTVYEIDDSHKIVKDKPLHTIYIKEAETKLLKQGNFKALVKDRRLNGLFSFVKTNSEAESKRNPISKLRVEYELGEYQEARIEIIQDMLALEEKLINKYKDLPTNKFSEMLNSWLEGKDEADKARFQNDVDFLIAVRNAFSHNQYPMHNKIEFANIKPFSLYTANNSEEKGLGIANQLKDKTKETTDKIKKIEKPIETKE

SEQ ID NO: 110 - protein, 1151 aa, Prevotella saccharolytica
MEDKPFWAAFFNLARHNVYLTVNHINKLLDLEKLYDEGKHKEIFEREDIFNISDDVMNDANSNGKKRKLDIKKIWDDLDTDLTRKYQLRELILKHFPFIQPAIIGAQTKERTTIDKDKRSTSTSNDSLKQTGEGDINDLLSLSNVKSMFFRLLQILEQLRNYYSHVKHSKSATMPNFDEDLLNWMRYIFIDSVNKVKEDYSSNSVIDPNTSFSHLIYKDEQGKIKPCRYPFTSKDGSINAFGLLFFVSLFLEKQDSIWMQKKIPGFKKASENYMKMTNEVFCRNHILLPKIRLETVYDKDWMLLDMLNEVVRCPLSLYKRLTPAAQNKFKVPEKSSDNANRQEDDNPFSRILVRHQNRFPYFVLRFFDLNEVFTTLRFQINLGCYHFAICKKQIGDKKEVHHLIRTLYGFSRLQNFTQNTRPEEWNTLVKTTEPSSGNDGKTVQGVPLPYISYTIPHYQIENEKIGIKIFDGDTAVDTDIWPSVSTEKQLNKPDKYTLTPGFKADVFLSVHELLPMMFYYQLLLCEGMLKTDAGNAVEKVLIDTRNAIFNLYDAFVQEKINTITDLENYLQDKPILIGHLPKQMIDLLKGHQRDMLKAVEQKKAMLIKDTERRLKLLDKQLKQETDVAAKNTGTLLKNGQIADWLVNDMMRFQPVKRDKEGNPINCSKANSTEYQMLQRAFAFYATDSCRLSRYFTQLHLIHSDNSHLFLSRFEYDKQPNLIAFYAAYLKAKLEFLNELQPQNWASDNYFLLLRAPKNDRQKLAEGWKNGFNLPRGLFTEKIKTWFNEHKTIVDISDCDIFKNRVGQVARLIPVFFDKKFKDHSQPFYRYDFNVGNVSKPTEANYLSKGKREELFKSYQNKFKNNIPAEKTKEYREYKNFSLWKKFERELRLIKNQDILIWLMCKNLFDEKIKPKKDILEPRIAVSYIKLDSLQTNTSTAGSLNALAKVVPMTLAIHIDSPKPKGKAGNNEKENKEFTVYIKEEGTKLLKWGNFKTLLADRRIKGLFSYIEHDDIDLKQHPLTKRRVDLELDLYQTCRIDIFQQTLGLEAQLLDKYSDLNTDNFYQMLIGWRKKEGIPRNIKEDTDFLKDVRNAFSHNQYPDSKKIAFRRIRKFNPKELILEEEEGLGIATQMYKEVEKVVNRIKRIELFD

SEQ ID NO: 111 - protein, 1159 aa, Myroides odoratimimus
MKDILTTDTTEKQNRFYSHKIADKYFFGGYFNLASNNIYEVFEEVNKRNTFGKLAKRDNGNLKNYIIHVFKDELSISDFEKRVAIFASYFPILETVDKKSIKERNRTIDLTLSQRIRQFREMLISLVTAVDQLRNFYTHYHHSDIVIENKVLDFLNSSFVSTALHVKDKYLKTDKTKEFLKETIAAELDILIEAYKKKQIEKKNTRFKANKREDILNAIYNEAFWSFINDKDKDKDKETVVAKGADAYFEKNHHKSNDPDFALNISEKGIVYLLSFFLTNKEMDSLKANLTGFKGKVDRESGNSIKYMATQRIYSFHTYRGLKQKIRTSEEGVKETLLMQMIDELSKVPNVVYQHLSTTQQNSFIEDWNEYYKDYEDDVETDDLSRVIHPVIRKRYEDRFNYFAIRFLDEFFDFPTLRFQVHLGDYVHDRRTKQLGKVESDRIIKEKVTVFARLKDINSAKASYFHSLEEQDKEELDNKWTLFPNPSYDFPKEHTLQHQGEQKNAGKIGIYVKLRDTQYKEKAALEEARKSLNPKERSATKASKYDIITQIIEANDNVKSEKPLVFTGQPIAYLSMNDIHSMLFSLLTDNAELKKTPEEVEAKLIDQIGKQINEILSKDTDTKILKKYKDNDLKETDTDKITRDLARDKEEIEKLILEQKQRADDYNYTSSTKFNIDKSRKRKHLLFNAEKGKIGVWLANDIKRFMFKESKSKWKGYQHTELQKLFAYFDTSKSDLELILSNMVMVKDYPIELIDLVKKSRTLVDFLNKYLEARLEYIENVITRVKNSIGTPQFKTVRKECFTFLKKSNYTVVSLDKQVERILSMPLFIERGFMDDKPTMLEGKSYKQHKEKFADWFVHYKENSNYQNFYDTEVYEITTEDKREKAKVTKKIKQQQKNDVFTLMMVNYMLEEVLKLSSNDRLSLNELYQTKEERIVNKQVAKDTQERNKNYIWNKVVDLQLCDGLVHIDNVKLKDIGNFRKYENDSRVKEFLTYQSDIVWSAYLSNEVDSNKLYVIERQLDNYESIRSKELLKEVQEIECSVYNQVANKESLKQSGNENFKQYVLQGLLPIGMDVREMLILSTDVKFKKEEIIQLGQAGEVEQDLYSLIYIRNKFAHNQLPIKEFFDFCENNYRSISDNEYYAEYYMEIFRSIKEKYAN

SEQ ID NO: 112 - protein, 1120 aa, Prevotella intermedia
MEDDKKTTDSIRYELKDKHFWAAFLNLARHNVYITVNHINKILEEDEINRDGYENTLENSWNEIKDINKKDRLSKLIIKHFPFLEATTYRQNPTDTTKQKEEKQAEAQSLESLKKSFFVFIYKLRDLRNHYSHYKHSKSLERPKFEEDLQNKMYNIFDVSIQFVKEDYKHNTDINPKKDFKHLDRKRKGKFHYSFADNEGNITESGLLFFVSLFLEKKDAIWVQKKLEGFKCSNKSYQKMTNEVFCRSRMLLPKLRLESTQTQDWILLDMLNELIRCPKSLYERLQGVNRKKFYVSFDPADEDYDAEQEPFKNTLVRHQDRFPYFALRYFDYNEVFANLRFQIDLGTYHFSIYKKLIGGQKEDRHLTHKLYGFERIQEFDKQNRPDEWKAIVKDSDTFKKKEEKEEEKPYISETTPHYHLENKKIGIAFKNHNIWPSTQTELTNNKRKKYNLGTSIKAEAFLSVHELLPMMFYYLLLKTENTKNDNKVGGKKETKKQGKHKIEAIIESKIKDIYALYDAFANGEINSEDELKEYLKGKDIKIVHLPKQMIAILKNEHKDMAEKAEAKQEKMKLATENRLKTLDKQLKGKIQNGKRYNSAPKSGEIASWLVNDMMRFQPVQKDENGESLNNSKANSTEYQLLQRTLAFFGSEHERLAPYFKQTKLIESSNPHPFLNDTEWEKCSNILSFYRSYLKARKNFLESLKPEDWEKNQYFLMLKEPKTNRETLVQGWKNGFNLPRGFFTEPIRKWFMEHWKSIKVDDLKRVGLVAKVTPLFFSEKYKDSVQPFYNYPFNVGDVNKPKEEDFLHREERIELWDKKKDKFKGYKAKKKFKEMTDKEKEEHRSYLEFQSWNKFERELRLVRNQDIVTWLLCTELIDKLKIDELNIKELKKLRLKDINTDTAKKEKNNILNRVMPMELPVTVYKVNKGGYIIKNKPLHTIYIKEAETKLLKQGNFKALVKDRRLNGLFSFVKTPSEAESESNPISKLRVEYELGKYQNARLDIIEDMLALEKKLIDKYNSLDTDNFHNMLTGWLELKGEAKKARFQNDVKLLTAVRNAFSHNQYPMYDENLFGNIERFSLSSSNIIESKGLDIAAKLKEEVSKAAKKIQNEEDNKKEKET

SEQ ID NO: 113 - protein, 1199 aa, Capnocytophaga canimorsus
MKNIQRLGKGNEFSPFKKEDKFYFGGFLNLANNNIEDFFKEIITRFGIVITDENKKPKETFGEKILNEIFKKDISIVDYEKWVNIFADYFPFTKYLSLYLEEMQFKNRVICFRDVMKELLKTVEALRNFYTHYDHEPIKIEDRVFYFLDKVLLDVSLTVKNKYLKTDKTKEFLNQHIGEELKELCKQRKDYLVGKGKRIDKESEIINGIYNNAFKDFICKREKQDDKENHNSVEKILCNKEPQNKKQKSSATVWELCSKSSSKYTEKSFPNRENDKHCLEVPISQKGIVFLLSFFLNKGEIYALTSNIKGFKAKITKEEPVTYDKNSIRYMATHRMFSFLAYKGLKRKIRTSEINYNEDGQASSTYEKETLMLQMLDELNKVPDVVYQNLSEDVQKTFIEDWNEYLKENNGDVGTMEEEQVIHPVIRKRYEDKFNYFAIRFLDEFAQFPTLRFQVHLGNYLCDKRTKQICDTTTEREVKKKITVFGRLSELENKKAIFLNEREEIKGWEVFPNPSYDFPKENISVNYKDFPIVGSILDREKQPVSNKIGIRVKIADELQREIDKAIKEKKLRNPKNRKANQDEKQKERLVNEIVSTNSNEQGEPVVFIGQPTAYLSMNDIHSVLYEFLINKISGEALETKIVEKIETQIKQIIGKDATTKILKPYTNANSNSINREKLLRDLEQEQQILKTLLEEQQQREKDKKDKKSKRKHELYPSEKGKVAVWLANDIKRFMPKAFKEQWRGYHHSLLQKYLAYYEQSKEELKNLLPKEVFKHFPFKLKGYFQQQYLNQFYTDYLKRRLSYVNELLLNIQNFKNDKDALKATEKECFKFFRKQNYIINPINIQIQSILVYPIFLKRGFLDEKPTMIDREKFKENKDTELADWFMHYKNYKEDNYQKFYAYPLEKVEEKEKFKRNKQINKQKKNDVYTLMMVEYIIQKIFGDKFVEENPLVLKGIFQSKAERQQNNTHAATTQERNLNGILNQPKDIKIQGKITVKGVKLKDIGNFRKYEIDQRVNTFLDYEPRKEWMAYLPNDWKEKEKQGQLPPNNVIDRQISKYETVRSKILLKDVQELEKIISDEIKEEHRHDLKQGKYYNFKYYILNGLLRQLKNENVENYKVFKLNTNPEKVNITQLKQEATDLEQKAFVLTYIRNKFAHNQLPKKEFWDYCQEKYGKIEKEKTYAEYFAEVFKREKEALIK

SEQ ID NO: 114 - protein, 1175 aa, Porphyromonas gulae
MTEQSERPYNGTYYTLEDKHFWAAFLNLARHNAYITLTHIDRQLAYSKADITNDQDVLSFKALWKNFDNDLERKSRLRSLILKHFSFLEGAAYGKKLFESKSSGNKSSKNKELTKKEKEELQANALSLDNLKSILFDFLQKLKDFRNYYSHYRHSGSSELPLFDGNMLQRLYNVFDVSVQRVKIDHEHNDEVDPHYHFNHLVRKGKKDRYGHNDNPSFKHHFVDGEGMVTEAGLLFFVSLFLEKRDAIWMQKKIRGFKGGTETYQQMTNEVFCRSRISLPKLKLESLRMDDWMLLDMLNELVRCPKPLYDRLREDDRACFRVPVDILPDEDDTDGGGEDPFKNTLVRHQDRFPYFALRYFDLKKVFTSLRFHIDLGTYHFAIYKKMIGEQPEDRHLTRNLYGFGRIQDFAEEHRPEEWKRLVRDLDYFETGDKPYISQTSPHYHIEKGKIGLRFMPEGQHLWPSPEVGTTRTGRSKYAQDKRLTAEAFLSVHELMPMMFYYFLLREKYSEEVSAERVQGRIKRVIEDVYAVYDAFARDEINTRDELDACLADKGIRRGHLPRQMIAILSQEHKDMEEKIRKKLQEMMADTDHRLDMLDRQTDRKIRIGRKNAGLPKSGVIADWLVRDMMRFQPVAKDASGKPLNNSKANSTEYRMLQRALALFGGEKERLTPYFRQMNLTGGNNPHPFLHETRWESHTNILSFYRSYLRARKAFLERIGRSDRVENRPFLLLKEPKTDRQTLVAGWKGEFHLPRGIFTEAVRDCLIEMGHDEVASYKEVGFMAKAVPLYFERACEDRVQPFYDSPFNVGNSLKPKKGRFLSKEERAEEWERGKERFRDLEAWSYSAARRIEDAFAGIEYASPGNKKKIEQLLRDLSLWEAFESKLKVRADRINLAKLKKEILEAQEHPYHDFKSWQKFERELRLVKNQDIITWMMCRDLMEENKVEGLDTGTLYLKDIRPNVQEQGSLNVLNRVKPMRLPVVVYRADSRGHVHKEEAPLATVYIEERDTKLLKQGNFKSFVKDRRLNGLFSFVDTGGLAMEQYPISKLRVEYELAKYQTARVCVFELTLRLEESLLTRYPHLPDESFREMLESWSDPLLAKWPELHGKVRLLIAVRNAFSHNQYPMYDEAVFSSIRKYDPSSPDAIEERMGLNIAHRLSEEVKQAKETVERIIQA

SEQ ID NO: 115 - protein, 1090 aa, Prevotella sp
MNIPALVENQKKYFGTYSVMAMLNAQTVLDHIQKVADIEGEQNENNENLWFHPVMSHLYNAKNGYDKQPEKTMFIIERLQSYFPFLKIMAENQREYSNGKYKQNRVEVNSNDIFEVLKRAFGVLKMYRDLTNHYKTYEEKLNDGCEFLTSTEQPLSGMINNYYTVALRNMNERYGYKTEDLAFIQDKRFKFVKDAYGKKKSQVNTGFFLSLQDYNGDTQKKLHLSGVGIALLICLFLDKQYINIFLSRLPIFSSYNAQSEERRIIIRSFGINSIKLPKDRIHSEKSNKSVAMDMLNEVKRCPDELFTTLSAEKQSRFRIISDDHNEVLMKRSSDRFVPLLLQYIDYGKLFDHIRFHVNMGKLRYLLKADKTCIDGQTRVRVIEQPLNGFGRLEEAETMRKQENGTFGNSGIRIRDFENMKRDDANPANYPYIVDTYTHYILENNKVEMFINDKEDSAPLLPVIEDDRYVVKTIPSCRMSTLEIPAMAFHMFLFGSKKTEKLIVDVHNRYKRLFQAMQKEEVTAENIASFGIAESDLPQKILDLISGNAHGKDVDAFIRLTVDDMLTDTERRIKRFKDDRKSIRSADNKMGKRGFKQISTGKLADFLAKDIVLFQPSVNDGENKITGLNYRIMQSAIAVYDSGDDYEAKQQFKLMFEKARLIGKGTTEPHPFLYKVFARSIPANAVEFYERYLIERKFYLTGLSNEIKKGNRVDVPFIRRDQNKWKTPAMKTLGRIYSEDLPVELPRQMFDNEIKSHLKSLPQMEGIDFNNANVTYLIAEYMKRVLDDDFQTFYQWNRNYRYMDMLKGEYDRKGSLQHCFTSVEEREGLWKERASRTERYRKQASNKIRSNRQMRNASSEEIETILDKRLSNSRNEYQKSEKVIRRYRVQDALLFLLAKKTLTELADFDGERFKLKEIMPDAEKGILSEIMPMSFTFEKGGKKYTITSEGMKLKNYGDFFVLASDKRIGNLLELVGSDIVSKEDIMEEFNKYDQCRPEISSIVFNLEKWAFDTYPELSARVDREEKVDFKSILKILLNNKNINKEQSDILRKIRNAFDHNNYPDKGVVEIKALPEIAMSIKKAFGEYAIMK

SEQ ID NO: 116 - protein, 1150 aa, Flavobacterium branchiophilum
MENLNKILDKENEICISKIFNTKGIAAPITEKALDNIKSKQKNDLNKEARLHYFSIGHSFKQIDTKKVFDYVLIEELKDEKPLKFITLQKDFFTKEFSIKLQKLINSIRNINNHYVHNFNDINLNKIDSNVFHFLKESFELAIIEKYYKVNKKYPLDNEIVLFLKELFIKDENTALLNYFTNLSKDEAIEYILTFTITENKIWNINNEHNILNIEKGKYLTFEAMLFLITIFLYKNEANHLLPKLYDFKNNKSKQELFTFFSKKFTSQDIDAEEGHLIKFRDMIQYLNHYPTAWNNDLKLESENKNKIMTTKLIDSIIEFELNSNYPSFATDIQFKKEAKAFLFASNKKRNQTSFSNKSYNEEIRHNPHIKQYRDEIASALTPISFNVKEDKFKIFVKKHVLEEYFPNSIGYEKFLEYNDFTEKEKEDFGLKLYSNPKTNKLIERIDNHKLVKSHGRNQDRFMDFSMRFLAENNYFGKDAFFKCYKFYDTQEQDEFLQSNENNDDVKFHKGKVTTYIKYEEHLKNYSYWDCPFVEENNSMSVKISIGSEEKILKIQRNLMIYFLENALYNENVENQGYKLVNNYYRELKKDVEESIASLDLIKSNPDFKSKYKKILPKRLLHNYAPAKQDKAPENAFETLLKKADFREEQYKKLLKKAEHEKNKEDFVKRNKGKQFKLHFIRKACQMMYFKEKYNTLKEGNAAFEKKDPVIEKRKNKEHEFGHHKNLNITREEFNDYCKWMFAFNGNDSYKKYLRDLFSEKHFFDNQEYKNLFESSVNLEAFYAKTKELFKKWIETNKPTNNENRYTLENYKNLILQKQVFINVYHFSKYLIDKNLLNSENNVIQYKSLENVEYLISDFYFQSKLSIDQYKTCGKLFNKLKSNKLEDCLLYEIAYNYIDKKNVHKIDIQKILTSKIILTINDANTPYKISVPFNKLERYTEMIAIKNQNNLKARFLIDLPLYLSKNKIKKGKDSAGYEIIIKNDLEIEDINTINNKIINDSVKFTEVLMELEKYFILKDKCILSKNYIDNSEIPSLKQFSKVWIKENENEIINYRNIACHFHLPLLETFDNLLLNVEQKFIKEELQNVSTINDLSKPQEYLILLFIKFKHNNFYLNLFNKNESKTIKNDKEVKKNRVLQKFINQVILKKK

SEQ ID NO: 117 - protein, 1159 aa, Myroides odoratimimus
MKDILTTDTTEKQNRFYSHKIADKYFFGGYFNLASNNIYEVFEEVNKRNTFGKLAKRDNGNLKNYIIHVFKDELSISDFEKRVAIFASYFPILETVDKKSIKERNRTIDLTLSQRIRQFREMLISLVTAVDQLRNFYTHYHHSDIVIENKVLDFLNSSFVSTALHVKDKYLKTDKTKEFLKETIAAELDILIEAYKKKQIEKKNTRFKANKREDILNAIYNEAFWSFINDKDKDKDKETVVAKGADAYFEKNHHKSNDPDFALNISEKGIVYLLSFFLTNKEMDSLKANLTGFKGKVDRESGNSIKYMATQRIYSFHTYRGLKQKIRTSEEGVKETLLMQMIDELSKVPNVVYQHLSTTQQNSFIEDWNEYYKDYEDDVETDDLSRVTHPVIRKRYEDRFNYFAIRFLDEFFDFPTLRFQVHLGDYVHDRRTKQLGKVESDRIIKEKVTVFARLKDINSAKASYFHSLEEQDKEELDNKWTLFPNPSYDFPKEHTLQHQGEQKNAGKIGIYVKLRDTQYKEKAALEEARKSLNPKERSATKASKYDIITQIIEANDNVKSEKPLVFTGQPIAYLSMNDIHSMLFSLLTDNAELKKTPEEVEAKLIDQIGKQINEILSKDTDTKILKKYKDNDLKETDTDKITRDLARDKEEIEKLILEQKQRADDYNYTSSTKFNIDKSRKRKHLLFNAEKGKIGVWLANDIKRFMFKESKSKWKGYQHIELQKLFAYFDTSKSDLELILSNMVMVKDYPIELIDLVKKSRTLVDFLNKYLEARLEYIENVITRVKNSIGTPQFKTVRKECFTFLKKSNYTVVSLDKQVERILSMPLFIERGFMDDKPTMLEGKSYKQHKEKFADWFVHYKENSNYQNFYDTEVYEITTEDKREKAKVTKKIKQQQKNDVFTLMMVNYMLEEVLKLSSNDRLSLNELYQTKEERIVNKQVAKDTQERNKNYIWNKVVDLQLCDGLVHIDNVKLKDIGNFRKYENDSRVKEFLTYQSDIVWSAYLSNEVDSNKLYVIERQLDNYESIRSKELLKEVQEIECSVYNQVANKESLKQSGNENFKQYVLQGLLPIGMDVREMLILSTDVKFKKEEIIQLGQAGEVEQDLYSLIYIRNKFAHNQLPIKEFFDFCENNYRSISDNEYYAEYYMEIFRSIKEKYAN

SEQ ID NO: 118 - protein, 1214 aa, Flavobacterium columnare
MSSKNESYNKQKTFNHYKQEDKYFFGGFLNNADDNLRQVGKEFKTRINFNHNNNELASVFKDYFNKEKSVAKREHALNLLSNYFPVLERIQKHTNHNFEQTREIFELLLDTIKKLRDYYTHHYHKPITINPKIYDFLDDTLLDVLITIKKKKVKNDTSRELLKEKLRPELTQLKNQKREELIKKGKKLLEENLENAVFNHCLIPFLEENKTDDKQNKTVSLRKYRKSKPNEETSITLTQSGLVFLMSFFLHRKEFQVFTSGLERFKAKVNTIKEEEISLNKNNIVYMITHWSYSYYNFKGLKHRIKTDQGVSTLEQNNTTHSLTNTNTKEALLTQIVDYLSKVPNEIYETLSEKQQKEFEEDINEYMRENPENEDSTFSSIVSHKVIRKRYENKFNYFAMRFLDEYAELPTLRFMVNFGDYIKDRQKKILESIQFDSERIIKKEIHLFEKLSLVTEYKKNVYLKETSNIDLSRFPLFPNPSYVMANNNIPFYIDSRSNNLDEYLNQKKKAQSQNKKRNLTFEKYNKEQSKDAIIAMLQKEIGVKDLQQRSTIGLLSCNELPSMLYEVIVKDIKGAELENKIAQKIREQYQSIRDFTLDSPQKDNIPTTLIKTINTDSSVTFENQPIDIPRLKNALQKELTLTQEKLLNVKEHEIEVDNYNRNKNTYKFKNQPKNKVDDKKLQRKYVFYRNEIRQEANWLASDLIHFMKNKSLWKGYMHNELQSFLAFFEDKKNDCIALLETVFNLKEDCILTKGLKNLFLKHGNFIDFYKEYLKLKEDFLSTESTFLENGFIGLPPKILKKELSKRLKYIFIVFQKRQFIIKELEEKKNNLYADAINLSRGIFDEKPTMIPFKKPNPDEFASWFVASYQYNNYQSFYELTPDIVERDKKKKYKNLRAINKVKIQDYYLKLMVDTLYQDLFNQPLDKSLSDFYVSKAEREKIKADAKAYQKLNDSSLWNKVIHLSLQNNRITANPKLKDIGKYKRALQDEKIATLLTYDARTWTYALQKPEKENENDYKELHYTALNMELQEYEKVRSKELLKQVQELEKKILDKFYDFSNNASHPEDLEIEDKKGKRHPNFKLYITKALLKNESEIINLENIDIEILLKYYDYNTEELKEKIKNMDEDEKAKIINTKENYNKITNVLIKKALVLIIIRNKMAHNQYPPKFIYDLANRFVPKKEEEYFATYFNRVFETITKELWENKEKKDKTQV

SEQ ID NO: 119 - protein, 1119 aa, Porphyromonas gingivalis
MTEQNEKPYNGTYYTLEDKHFWAAFLNLARHNAYITLAHIDRQLAYSKADITNDEDILFFKGQWKNLDNDLERKARLRSLILKHFSFLEGAAYGKKLFESQSSGNKSSKKKELSKKEKEELQANALSLDNLKSILFDFLQKLKDFRNYYSHYRHPESSELPLFDGNMLQRLYNVFDVSVQRVKRDHEHNDKVDPHRHFNHLVRKGKKDKYGNNDNPFFKHHFVDREGTVTEAGLLFFVSLFLEKRDAIWMQKKIRGFKGGTEAYQQMTNEVFCRSRISLPKLKLESLRTDDWMLLDMLNELVRCPKSLYDRLREEDRARFRVPVDILSDEDDTDGTEEDPFKNTLVRHQDRFPYFALRYFDLKKVFTSLRFHIDLGTYHFAIYKKNIGEQPEDRHLTRNLYGFGRIQDFAEEHRPEEWKRLVRDLDYFETGDKPYITQTTPHYHIEKGKIGLRFVPEGQHLWPSPEVGATRTGRSKYAQDKRLTAEAFLSVHELMPMMFYYFLLREKYSEEVSAEKVQGRIKRVIEDVYAVYDAFARDEINTRDELDACLADKGIRRGHLPRQMIAILSQEHKDMEEKVRKKLQEMIADTDHRLDMLDRQTDRKIRIGRKNAGLPKSGVVADWLVRDMMRFQPVAKDTSGKPLNNSKANSTEYRMLQRALALFGGEKERLTPYFRQMNLTGGNNPHPFLHETRWESHTNILSFYRSYLEARKAFLQSIGRSDRVENHRFLLLKEPKTDRQTLVAGWKGEFHLPRGIFTEAVRDCLIEMGYDEVGSYKEVGFMAKAVPLYFERASKDRVQPFYDYPFNVGNSLKPKKGRFLSKEKRAEEWESGKERFRLAKLKKEILEAKEHPYHDFKSWQKFERELRLVKNQDIITWMMCRDLMEENKVEGLDTGTLYLKDIRTDVQEQGSLNVLNRVKPMRLPVVVYRADSRGHVHKEQAPLATVYIEERDTKLLKQGNFKSFVKDRRLNGLFSFVDTGALAMEQYPISKLRVEYELAKYQTARVCAFEQTLELEESLLTRYPHLPDKNFRKMLESWSDPLLDKWPDLHGNVRLLIAVRNAFSHNQYPMYDETLFSSIRKYDPSSPDAIEERMGLNIAHRLSEEVKQAKEMVERIIQA

SEQ ID NO: 120 - protein, 1175 aa, Porphyromonas sp.
MTEQSERPYNGTYYTLEDKHFWAAFLNLARHNAYITLTHIDRQLAYSKADITNDQDVLSFKALWKNFDNDLERKSRLRSLILKHFSFLEGAAYGKKLFESKSSGNKSSKNKELTKKEKEELQANALSLDNLKSILFDFLQKLKDFRNYYSHYRHSESSELPLFDGNMLQRLYNVFDVSVQRVKRDHEHNDKVDPHRHFNHLVRKGKKDRYGHNDNPSFKHHFVDSEGMVTEAGLLFFVSLFLEKRDAIWMQKKIRGFKGGTETYQQMTNEVFCRSRISLPKLKLESLRTDDWMLLDMLNELVRCPKPLYDRLREDDRACFRVPVDILPDEDDTDGGGEDPFKNTLVRHQDRFPYFALRYFDLKKVFTSLRFHIDLGTYHFAIYKKMIGEQPEDRHLTRNLYGFGRIQDFAEEHRPEEWKRLVRDLDYFETGDKPYISQTTPHYHIEKGKIGLRFVPEGQHLWPSPEVGTTRTGRSKYAQDKRLTAEAFLSVHELMPMMFYYFLLREKYSEEVSAEKVQGRIKRVIEDVYAIYDAFARDEINTLKELDACLADKGIRRGHLPKQMIGILSQERKDMEEKVRKKLQEMIADTDHRLDMLDRQTDRKIRIGRKNAGLPKSGVIADWLVRDMMRFQPVAKDTSGKPLNNSKANSTEYRMLQRALALFGGEKERLTPYFRQMNLTGGNNPHPFLHETRWESHTNILSFYRSYLRARKAFLERIGRSDRVENCPFLLLKEPKTDRQTLVAGWKGEFHLPRGIFTEAVRDCLIEMGYDEVGSYREVGFMAKAVPLYFERACEDRVQPFYDSPFNVGNSLKPKKGRFLSKEDRAEEWERGKERFRDLEAWSHSAARRIKDAFAGIEYASPGNKKKIEQLLRDLSLWEAFESKLKVRADKINLAKLKKEILEAQEHPYHDFKSWQKFERELRLVKNQDIITWMMCRDLMEENKVEGLDTGTLYLKDIRPNVQEQGSLNVLNRVKPMRLPVVVYRADSRGHVHKEEAPLATVYIEERDTKLLKQGNFKSFVKDRRLNGLFSFVDTGGLAMEQYPISKLRVEYELAKYQTARVCVFELTLRLEESLLSRYPHLPDESFREMLESWSDPLLAKWPELHGKVRLLIAVRNAFSHNQYPMYDEAVFSSIRKYDPSSPDAIEERMGLNIAHRLSEEVKQAKETVERIIQA

SEQ ID NO: 121 - protein, 1132 aa, Prevotella intermedia
MEDDKKTKESTNMLDNKHFWAAFLNLARHNVYITVNHINKVLELKNKKDQDIIIDNDQDILAIKTHWEKVNGDLNKTERLRELMTKHFPFLETAIYTKNKEDKEEVKQEKQAKAQSFDSLKHCLFLFLEKLQEARNYYSHYKYSESTKEPMLEKELLKKMYNIFDDNIQLVIKDYQHNKDINPDEDFKHLDRTEEEFNYYFTTNKKGNITASGLLFFVSLFLEKKDAIWMQQKLRGFKDNRESKKKMTHEVFCRSRMLLPKLRLESTQTQDWILLDMLNELIRCPKSLYERLQGEYRKKFNVPFDSADEDYDAEQEPFKNTLVRHQDRFPYFALRYFDYNEIFTNLRFQIDLGTYHFSIYKKLIGGQKEDRHLTHKLYGFERIQEFAKQNRTDEWKAIVKDFDTYETSEEPYISETAPHYHLENQKIGIRFRNDNDEIWPSLKTNGENNEKRKYKLDKQYQAEAFLSVHELLPMMFYYLLLKKEEPNNDKKNASIVEGFIKREIRDIYKLYDAFANGEINNIDDLEKYCEDKGIPKRHLPKQMVAILYDEHKDMAEEAKRKQKEMVKDTKKLLATLEKQTQGEIEDGGRNIRLLKSGEIARWLVNDMMRFQPVQKDNEGNPLNNSKANSTEYQMLQRSLALYNKEEKPTRYFRQVNLINSSNPHPFLKWTKWEECNNILSFYRSYLTKKIEFLNKLKPEDWEKNQYFLKLKEPKTNRETLVQGWKNGFNLPRGIFTEPIREWFKRHQNDSEEYEKVETLDRVGLVTKVIPLFFKKEDSKDKEEYLKKDAQKEINNCVQPFYGFPYNVGNIHKPDEKDFLPSEERKKLWGDKKYKFKGYKAKVKSKKLTDKEKEEYRSYLEFQSWNKFERELRLVRNQDIVTWLLCTELIDKLKVEGLNVEELKKLRLKDIDTDTAKQEKNNILNRVMPMQLPVTVYEIDDSHNIVKDRPLHTVYIEETKTKLLKQGNFKALVKDRRLNGLFSFVDTSSETELKSNPISKSLVEYELGEYQNARIETIKDMLLLEETLIEKYKTLPTDNFSDMLNGWLEGKDEADKARFQNDVKLLVAVRNAFSHNQYPMRNRIAFANINPFSLSSADTSEEKKLDIANQLKDKTHKIIKRIIEIEKPIETKE

SEQ ID NO: 122 - protein, 1134 aa, Prevotella intermedia
MKMEDDKKTKESTNMLDNKHFWAAFLNLARHNVYITVNHINKVLELKNKKDQDIIIDNDQDILAIKTHWEKVNGDLNKTERLRELMTKHFPFLETAIYTKNKEDKEEVKQEKQAKAQSFDSLKHCLFLFLEKLQEARNYYSHYKYSESTKEPMLEKELLKKMYNIFDDNIQLVIKDYQHNKDINPDEDFKHLDRTEEEFNYYFTTNKKGNITASGLLFFVSLFLEKKDAIWMQQKLRGFKDNRESKKKMTHEVFCRSRMLLPKLRLESTQTQDWILLDMLNELIRCPKSLYERLQGEYRKKFNVPFDSADEDYDAEQEPFKNTLVRHQDRFPYFALRYFDYNEIFTNLRFQIDLGTYHFSIYKKLIGGQKEDRHLTHKLYGFERIQEFAKQNRTDEWKAIVKDFDTYETSEEPYISETAPHYHLENQKIGIRFRNDNDEIWPSLKTNGENNEKRKYKLDKQYQAEAFLSVHELLPMMFYYLLLKKEEPNNDKKNASIVEGFIKREIRDIYKLYDAFANGEINNIDDLEKYCEDKGIPKRHLPKQMVAILYDEHKDMAEEAKRKQKEMVKDTKKLLATLEKQTQGEIEDGGRNIRLLKSGEIARWLVNDMMRFQPVQKDNEGNPLNNSKANSTEYQMLQRSLALYNKEEKPTRYFRQVNLINSSNPHPFLKWTKWEECNNILSFYRSYLTKKIEFLNKLKPEDWEKNQYFLKLKEPKTNRETLVQGWKNGFNLPRGIFTEPIREWFKRHQNDSEEYEKVETLDRVGLVTKVIPLFFKKEDSKDKEEYLKKDAQKEINNCVQPFYGFPYNVGNIHKPDEKDFLPSEERKKLWGDKKYKFKGYKAKVKSKKLTDKEKEEYRSYLEFQSWNKFERELRLVRNQDIVTWLLCTELIDKLKVEGLNVEELKKLRLKDIDTDTAKQEKNNILNRVMPMQLPVTVYEIDDSHNIVKDRPLHTVYIEETKTKLLKQGNFKALVKDRRLNGLFSFVDTSSETELKSNPISKSLVEYELGEYQNARIETIKDMLLLEETLIEKYKTLPTDNFSDMLNGWLEGKDEADKARFQNDVKLLVAVRNAFSHNQYPMRNRIAFANINPFSLSSADTSEEKKLDIANQLKDKTHKIIKRIIEIEKPIETKE

SEQ ID NO: 123 - protein, 1133 aa, Prevotella intermedia
MEDDKKTTDSISYELKDKHFWAAFLNLARHNVYITVNHINKVLELKNKKDQDIIIDNDQDILAIKTHWEKVNGDLNKTERLRELMTKHFPFLETAIYSKNKEDKEEVKQEKQAKAQSFDSLKHCLFLFLEKLQETRNYYSHYKYSESTKEPMLEKELLKKMYNIFDDNIQLVIKDYQHNKDINPDEDFKHLDRTEEDFNYYFTRNKKGNITESGLLFFVSLFLEKKDAIWMQQKLRGFKDNRESKKKMTHEVFCRSRMLLPKLRLESTQTQDWILLDMLNELIRCPKSLYERLQGEDREKFKVPFDPADEDYDAEQEPFKNTLVRHQDRFPYFALRYFDYNEIFTNLRFQIDLGTFHFSIYKKLIGGQKEDRHLTHKLYGFERIQEFAKQNRPDEWKAIVKDLDTYETSNERYISETTPHYHLENQKIGIRFRNDNDEIWPSLKTNGENNEKSKYKLDKQYQAEAFLSVHELLPMMFYYLLLKKEEPNNDKKNASIVEGFIKREIRDMYKLYDAFANGEINNIDDLEKYCEDKGIPKRHLPKQMVAILYDEHKDMVKEAKRKQRKMVKDTEKLLAALEKQTQEKTEDGGRNIRLLKSGEIARWLVNDMMRFQPVQKDNEGNPLNNSKANSTEYQMLQRSLALYNKEEKPTRYFRQVNLINSSNPHPFLKWTKWEECNNILSFYRSYLTKKIEFLNKLKPEDWEKNQYFLKLKEPKTNRETLVQGWKNGFNLPRGIFTEPIREWFKRHQNDSKEYEKVEALDRVGLVTKVIPLFFKKEDSKDKEEDLKKDAQKEINNCVQPFYSFPYNVGNIHKPDEKDFLHREERIELWDKKKDKFKGYKAKVKSKKLTDKEKEEYRSYLEFQSWNKFERELRLVRNQDIVTWLLCTELIDKLKVEGLNVEELKKLRLKDIDTDTAKQEKNNILNRVMPMQLPVTVYEIDDSHNIVKDRPLHTVYIEETKTKLLKQGNFKALVKDRRLNGLFSFVDTSSEAELKSNPISKSLVEYELGEYQNARIETIKDMLLLEETLIEKYKNLPTDNFSDMLNGWLEGKDEADKARFQNDVKLLVAVRNAFSHNQYPMRNRIAFANINPFSLSSADTSEEKKLDIANQLKDKTHKIIKRIIEIEKPIETKE

SEQ ID NO: 124 - protein, 1127 aa, Prevotella buccae; identical to SEQ ID NO: 102

SEQ ID NO: 125 - protein, 1125 aa, Prevotella pallens
MKEEEKGKTPVVSTYNKDDKHFWAAFLNLARHNVYITVNHINKILGEGEINRDGYENTLEKSWNEIKDINKKDRLSKLIIKHFPFLEVTTYQRNSADTTKQKEEKQAEAQSLESLKKSFFVFIYKLRDLRNHYSHYKHSKSLERPKFEEDLQEKMYNIFDASIQLVKEDYKHNTDIKTEEDFKHLDRKGQFKYSFADNEGNITESGLLFFVSLFLEKKDAIWVQKKLEGFKCSNESYQKMTNEVFCRSRMLLPKLRLQSTQTQDWILLDMLNELIRCPKSLYERLREEDRKKFRVPIEIADEDYDAEQEPFKNALVRHQDRFPYFALRYFDYNEIFTNLRFQIDLGTYHFSIYKKQIGDYKESHHLTHKLYGFERIQEFTKQNRPDEWRKFVKTFNSFETSKEPYIPETTPHYHLENQKIGIRFRNDNDKIWPSLKTNSEKNEKSKYKLDKSFQAEAFLSVHELLPMMFYYLLLKTENTDNDNEIETKKKENKNDKQEKHKIEEIIENKITEIYALYDAFANGKINSIDKLEEYCKGKDIEIGHLPKQMIAILKSEHKDMATEAKRKQEEMLADVQKSLESLDNQINEEIENVERKNSSLKSGEIASWLVNDMMRFQPVQKDNEGNPLNNSKANSTEYQMLQRSLALYNKEEKPTRYFRQVNLIESSNPHPFLNNTEWEKCNNILSFYRSYLEAKKNFLESLKPEDWEKNQYFLMLKEPKTNCETLVQGWKNGFNLPRGIFTEPIRKWFMEHRKNITVAELKRVGLVAKVIPLFFSEEYKDSVQPFYNYLFNVGNINKPDEKNFLNCEERRELLRKKKDEFKKMTDKEKEENPSYLEFQSWNKFERELRLVRNQDIVTWLLCMELFNKKKIKELNVEKIYLKNINTNTTKKEKNTEEKNGEEKIIKEKNNILNRIMPMRLPIKVYGRENFSKNKKKKIRRNTFFTVYIEEKGTKLLKQGNFKALERDRRLGGLFSFVKTHSKAESKSNTISKSRVEYELGEYQKARIEIIKDMLALEETLIDKYNSLDTDNFHNMLTGWLKLKDEPDKASFQNDVDLLIAVRNAFSHNQYPMRNRIAFANINPFSLSSANTSEEKGLGIANQLKDKTHKTIEKIIEIEKPIETKE

SEQ ID NO: 126 - protein, 1157 aa, Myroides odoratimimus
MKDILTTDTTEKQNRFYSHKIADKYFFGGYFNLASNNIYEVFEEVNKRNTFGKLAKRDNGNLKNYIIHVFKDELSISDFEKRVAIFASYFPILETVDKKSIKERNRTIDLTLSQRIRQFREMLISLVTAVDQLRNFYTHYHHSEIVIENKVLDFLNSSLVSTALHVKDKYLKTDKTKEFLKETIAAELDILIEAYKKKQIEKKNTRFKANKREDILNAIYNEAFWSFINDKDKDKETVVAKGADAYFEKNHHKSNDPDFALNISEKGIVYLLSFFLTNKEMDSLKANLTGFKGKVDRESGNSIKYMATQRIYSFHTYRGLKQKIRTSEEGVKETLLMQMIDELSKVPNVVYQHLSTTQQNSFIEDWNEYYKDYEDDVETDDLSRVIHPVIRKRYEDRFNYFAIRFLDEFFDFPTLRFQVHLGDYVHDRRTKQLGKVESDRIIKEKVTVFARLKDINSAKANYFHSLEEQDKEELDNKWTLFPNPSYDFPKEHTLQHQGEQKNAGKIGIYVKLRDTQYKEKAALEEARKSLNPKERSATKASKYDIITQIIEANDNVKSEKPLVFTGQPIAYLSMNDIHSMLFSLLTDNAELKKTPEEVEAKLIDQIGKQINEILSKDTDTKILKKYKDNDLKETDTDKITRDLARDKEEIEKLILEQKQRADDYNYTSSTKFNIDKSRKRKHLLFNAEKGKIGVWLANDIKRFMTEEFKSKWKGYQHTELQKLFAYYDTSKSDLDLILSDMVMVKDYPIELIALVKKSRTLVDFLNKYLEARLGYMENVITRVKNSIGTPQFKTVRKECFTFLKKSNYTVVSLDKQVERILSMPLFIERGFMDDKPTMLEGKSYQQHKEKFADWFVHYKENSNYQNFYDTEVYEITTEDKREKAKVTKKIKQQQKNDVFTLMMVNYMLEEVLKLSSNDRLSLNELYQTKEERIVNKQVAKDTQERNKNYIWNKVVDLQLCEGLVRIDKVKLKDIGNFRKYENDSRVKEFLTYQSDIVWSAYLSNEVDSNKLYVIERQLDNYESIRSKELLKEVQEIECSVYNQVANKESLKQSGNENFKQYVLQGLVPIGMDVREMLILSTDVKFIKEEIIQLGQAGEVEQDLYSLIYIRNKFAHNQLPIKEFFDFCENNYRSISDNEYYAEYYMEIFRSIKEKYTS

SEQ ID NO: 127 - protein, 1157 aa, Myroides odoratimimus
MKDILTTDTTEKQNRFYSHKIADKYFFGGYFNLASNNIYEVFEEVNKRNTFGKLAKRDNGNLKNYIIHVFKDELSISDFEKRVAIFASYFPILETVDKKSIKERNRTIDLTLSQRIRQFREMLISLVTAVDQLRNFYTHYHHSEIVIENKVLDFLNSSLVSTALHVKDKYLKTDKTKEFLKETIAAELDILIEAYKKKQIEKKNTRFKANKREDILNAIYNEAFWSFINDKDKDKETVVAKGADAYFEKNHHKSNDPDFALNISEKGIVYLLSFFLTNKEMDSLKANLTGFKGKVDRESGNSIKYMATQRIYSFHTYRGLKQKIRTSEEGVKETLLMQMIDELSKVPNVVYQHLSTTQQNSFIEDWNEYYKDYEDDVETDDLSRVIHPVIRKRYEDRFNYFAIRFLDEFFDFPTLRFQVHLGDYVHDRRTKQLGKVESDRIIKEKVTVFARLKDINSAKASYFHSLEEQDKEELDNKWTLFPNPSYDFPKEHTLQHQGEQKNAGKIGIYVKLRDTQYKEKAALEEARKSLNPKERSATKASKYDIITQIIEANDNVKSEKPLVFTGQPIAYLSMNDIHSMLFSLLTDNAELKKTPEEVEAKLIDQIGKQINEILSKDTDTKILKKYKDNDLKETDTDKITRDLARDKEEIEKLILEQKQRADDYNYTSSTKFNIDKSRKRKHLLFNAEKGKIGVWLANDIKRFMFKESKSKWKGYQHTELQKLFAYFDTSKSDLELILSDMVMVKDYPIELIDLVRKSRTLVDFLNKYLEARLGYIENVITRVKNSIGTPQFKTVRKECFAFLKESNYTVASLDKQIERILSMPLFIERGFMDSKPTMLEGKSYQQHKEDFADWFVHYKENSNYQNFYDTEVYEIITEDKREQAKVTKKIKQQQKNDVFTLMMVNYMLEEVLKLPSNDRLSLNELYQTKEERIVNKQVAKDTQERNKNYIWNKVVDLQLCEGLVRIDKVKLKDIGNFRKYENDSRVKEFLTYQSDIVWSGYLSNEVDSNKLYVIERQLDNYESIRSKELLKEVQEIECIVYNQVANKESLKQSGNENFKQYVLQGLLPRGTDVREMLILSTDVKFKKEEIMQLGQVREVEQDLYSLIYIRNKFAHNQLPIKEFFDFCENNYRPISDNEYYAEYYMEIFRSIKEKYAS

SEQ ID NO: 128 - protein, 1224 aa, Bergeyella zoohelcum; identical to SEQ ID NO: 100

SEQ ID NO: 129 - protein, 1150 aa, Prevotella saccharolytica
MMEKENVQGSHIYYEPTDKCFWAAFYNLARHNAYLTIAHINSFVNSKKGINNDDKVLDIIDDWSKFDNDLLMGARLNKLILKHFPFLKAPLYQLAKRKTRKQQGKEQQDYEKKGDEDPEVIQEAIANAFKMANVRKTLHAFLKQLEDLRNHFSHYNYNSPAKKMEVKFDDGFCNKLYYVFDAALQMVKDDNRMNPEINMQTDFEHLVRLGRNRKIPNTFKYNFTNSDGTINNNGLLFFVSLFLEKRDAIWMQKKIKGFKGGTENYMRMTNEVFCRNRMVIPKLRLETDYDNHQLMFDMLNELVRCPLSLYKRLKQEDQDKFRVPIEFLDEDNEADNPYQENANSDENPTEETDPLKNTLVRHQHRFPYFVLRYFDLNEVFKQLRFQINLGCYHFSIYDKTIGERTEKRHLTRTLFGFDRLQNFSVKLQPEHWKNMVKHLDTEESSDKPYLSDAMPHYQIENEKIGIHFLKTDTEKKETVWPSLEVEEVSSNRNKYKSEKNLTADAFLSTHELLPMMFYYQLLSSEEKTRAAAGDKVQGVLQSYRKKIFDIYDDFANGTINSMQKLDERLAKDNLLRGNMPQQMLAILEHQEPDMEQKAKEKLDRLITETKKRIGKLEDQFKQKVRIGKRRADLPKVGSIADWLVNDMMRFQPAKRNADNTGVPDSKANSTEYRLLQEALAFYSAYKDRLEPYFRQVNLIGGTNPHPFLHRVDWKKCNHLLSFYHDYLEAKEQYLSHLSPADWQKHQHFLLLKVRKDIQNEKKDWKKSLVAGWKNGFNLPRGLFTESIKTWFSTDADKVQITDTKLFENRVGLIAKLIPLYYDKVYNDKPQPFYQYPFNINDRYKPEDTRKRFTAASSKLWNEKKMLYKNAQPDSSDKIEYPQYLDFLSWKKLERELRMLRNQDMMVWLMCKDLFAQCTVEGVEFADLKLSQLEVDVNVQDNLNVLNNVSSMILPLSVYPSDAQGNVLRNSKPLHTVYVQENNTKLLKQGNFKSLLKDRRLNGLFSFIAAEGEDLQQHPLTKNRLEYELSIYQTMRISVFEQTLQLEKAILTRNKTLCGNNFNNLLNSWSEHRTDKKTLQPDIDFLIAVRNAFSHNQYPMSTNTVMQGIEKFNIQTPKLEEKDGLGIASQLAKKTKDAASRLQNIINGGTN

SEQ ID NO: 130 - protein, 1175 aa, Porphyromonas gingivalis
MTEQNEKPYNGTYYTLEDKHFWAAFFNLARHNAYITLTHIDRQLAYSKADITNDEDILFFKGQWKNLDNDLERKARLRSLILKHFSFLEGAAYGKKLFESQSSGNKSSKKKELTKKEKEELQANALSLDNLKSILFDFLQKLKDFRNYYSHYRHPESSELPLFDGNMLQRLYNVFDVSVQRVKRDHEHNDKVDPHRHFNHLVRKGKKDRCGNNDNPFFKHHFVDREEKVTEAGLLFFVSLFLEKRDAIWMQKKIRGFKGGTETYQQMTNEVFCRSRISLPKLKLESLRTDDWMLLDMLNELVRCPKSLYDRLREEDRARFRVPVDILSDEDDTDGTEEDPFKNTLVRHQDRFPYFALRYFDLKKVFTSLRFHIDLGTYHFAIYKKNIGEQPEDRHLTRNLYGFGRIQDFAEEHRPEEWKRLVRDLDYFETGDKPYITQTTPHYHIEKGKIGLRFVPEGQLLWPSPEVGATRTGRSKYAQDKRFTAEAFLSVHELMPMMFYYFLLREKYSEEASAERVQGRIKRVIEDVYAVYDAFARGEIDTLDRLDACLADKGIRRGHLPRQMIAILSQEHKDMEEKVRKKLQEMIADTDHRLDMLDRQTDRKIRIGRKNAGLPKSGVIADWLVRDMMRFQPVAKDTSGKPLNNSKANSTEYRMLQRALALFGGEKERLTPYFRQMNLTGGNNPHPFLHETRWESHTNILSFYRSYLKARKAFLQSIGRSDRVENHRFLLLKEPKTDRQTLVAGWKGEFHLPRGIFTEAVRDCLIEMGLDEVGSYKEVGFMAKAVPLYFERACKDRVQPFYDYPFNVGNSLKPKKGRFLSKEKRAEEWESGKERFRDLEAWSHSAARRIEDAFAGIENASRENKKKIEQLLQDLSLWETFESKLKVKADKINIAKLKKEILEAKEHPYLDFKSWQKFERELRLVKNQDIITWMMCRDLMEENKVEGLDTGTLYLKDIRTDVHEQGSLNVLNRVKPMRLPVVVYRADSRGHVHKEQAPLATVYIEERDTKLLKQGNFKSFVKDRRLNGLFSFVDTGALAMEQYPISKLRVEYELAKYQTARVCAFEQTLELEESLLTRYPHLPDKNFRKMLESWSDPLLDKWPDLHGNVRLLIAVRNAFSHNQYPMYDETLFSSIRKYDPSSPDAIEERMGLNIAHRLSEEVKQAKEMVERIIQA

SEQ ID NO: 131 - protein, 1115 aa, Bacteroides pyogenes
MESIKNSQKSTGKTLQKDPPYFGLYLNMALLNVRKVENHIRKWLGDVALLPEKSGFHSLLTTDNLSSAKWTRFYYKSRKFLPFLEMFDSDKKSYENRRETTECLDTIDRQKISSLLKEVYGKLQDIRNAFSHYHIDDQSVKHTALIISSEMHRFIENAYSFALQKTRARFTGVFVETDFLQAEEKGDNKKFFAIGGNEGIKLKDNALIFLICLFLDREEAFKFLSRATGFKSTKEKGFLAVRETFCALCCRQPHERLLSVNPREALLMDMLNELNRCPDILFEMLDEKDQKSFLPLLGEEEQAHILENSLNDELCEAIDDPFEMIASLSKRVRYKNRFPYLMLRYIEEKNLLPFIRFRIDLGCLELASYPKKMGEENNYERSVTDHAMAFGRLTDFHNEDAVLQQITKGITDEVRFSLYAPRYAIYNNKIGFVRTGGSDKISFPTLKKKGGEGHCVAYTLQNTKSFGFISIYDLRKILLLSFLDKDKAKNIVSGLLEQCEKHWKDLSENLFDAIRTELQKEFPVPLIRYTLPRSKGGKLVSSKLADKQEKYESEFERRKEKLTEILSEKDFDLSQIPRRMIDEWLNVLPTSREKKLKGYVETLKLDCRERLRVFEKREKGEHPVPPRIGEMATDLAKDIIRMVIDQGVKQRITSAYYSEIQRCLAQYAGDDNRRHLDSIIRELRLKDTKNGHPFLGKVLRPGLGHTEKLYQRYFEEKKEWLEATFYPAASPKRVPRFVNPPTGKQKELPLIIRNLMKERPEWRDWKQRKNSHPIDLPSQLFENEICRLLKDKIGKEPSGKLKWNEMFKLYWDKEFPNGMQRFYRCKRRVEVFDKVVEYEYSEEGGNYKKYYEALIDEVVRQKISSSKEKSKLQVEDLTLSVRRVFKRAINEKEYQLRLLCEDDRLLFMAVRDLYDWKEAQLDLDKIDNMLGEPVSVSQVIQLEGGQPDAVIKAECKLKDVSKLMRYCYDGRVKGLMPYFANHEATQEQVEMELRHYEDHRRRVFNWVFALEKSVLKNEKLRRFYEESQGGCEHRRCIDALRKASLVSEEEYEFLVHIRNKSAHNQFPDLEIGKLPPNVTSGFCECIWSKYKAIICRIIPFIDPERRFFGKLLEQK

SEQ ID NO: 132 - protein, 1135 aa, Porphyromonas gingivalis
MNTVPASENKGQSRTVEDDPQYFGLYLNLARENLIEVESHVRIKFGKKKLNEESLKQSLLCDHLLSVDRWTKVYGHSRRYLPFLHYFDPDSQIEKDHDSKTGVDPDSAQRLIRELYSLLDFLRNDFSHNRLDGTTFEHLEVSPDISSFITGTYSLACGRAQSRFADFFKPDDFVLAKNRKEQLISVADGKECLTVSGLAFFICLFLDREQASGMLSRIRGFKRTDENWARAVHETFCDLCIRHPHDRLESSNTKEALLLDMLNELNRCPRILYDMLPEEERAQFLPALDENSMNNLSENSLNEESRLLWDGSSDWAEALTKRIRHQDRFPYLMLRFIEEMDLLKGIRFRVDLGEIELDSYSKKVGRNGEYDRTITDHALAFGKLSDFQNEEEVSRMISGEASYPVRFSLFAPRYAIYDNKIGYCHTSDPVYPKSKTGEKRALSNPRSMGFISVHDLRKLLLMELLCEGSFSRMQSDFLRKANRILDETAEGKLQFSALFPEMRHRFIPPQNPKSKDRREKAETTLEKYKQEIKGRKDKLNSQLLSAFDMDQRQLPSRLLDEWMNIRPASHSVKLRTYVKQLNEDCRLRLQKFRKDGDGKARAIPLVGEMATFLSQDIVRMIISEETKKLITSAYYNEMQRSLAQYAGEENRHQFRAIVAELRLLDPSSGHPFLSATMETAHRYTEDFYKCYLEKKREWLAKTFYRPEQDENTKRRISVFFVPDGEARKLLPLLIRRRMKEQNDLQDWIRNKQAHPIDLPSHLFDSKIMELLKVKDGKKKWNEAFKDWWSTKYPDGMQPFYGLRRELNIHGKSVSYIPSDGKKFADCYTHLMEKTVQDKKRELRTAGKPVPPDLAADIKRSFHRAVNEREFMLRLVQEDDRLMLMAINKMMTDREEDILPGLKNIDSILDEENQFSLAVHAKVLEKEGEGGDNSLSLVPATIEIKSKRKDWSKYIRYRYDRRVPGLMSHFPEHKATLDEVKTLLGEYDRCRIKIFDWAFALEGAIMSDRDLKPYLHESSSREGKSGEHSTLVKMLVEKKGCLTPDESQYLILIRNKAAHNQFPCAAEMPLIYRDVSAKVGSIEGSSAKDLPEGSSLVDSLWKKYEMIIRKILPILDPENRFFGKLLNNMSQPINDL

SEQ ID NO: 133 - protein, 1135 aa, Porphyromonas gingivalis
MNTVPASENKGQSRTVEDDPQYFGLYLNLARENLIEVESHVRIKFGKKKLNEESLKQSLLCDHLLSVDRWTKVYGHSRRYLPFLHYFDPDSQIEKDHDSKTGVDPDSAQRLIRELYSLLDFLRNDFSHNRLDGTTFEHLEVSPDISSFITGTYSLACGRAQSRFADFFKPDDFVLAKNRKEQLISVADGKECLTVSGLAFFICLFLDREQASGMLSRIRGFKRTDENWARAVHETFCDLCIRHPHDRLESSNTKEALLLDMLNELNRCPRILYDMLPEEERAQFLPALDENSMNNLSENSLNEESRLLWDGSSDWAEALTKRIRHQDRFPYLMLRFIEEMDLLKGIRFRVDLGEIELDSYSKKVGRNGEYDRTITDHALAFGKLSDFQNEEEVSRMISGEASYPVRFSLFAPRYAIYDNKIGYCHTSDPVYPKSKTGEKRALSNPQSMGFISVHDLRKLLLMELLCEGSFSRMQSGFLRKANRILDETAEGKLQFSALFPEMRHRFIPPQNPKSKDRREKAETTLEKYKQEIKGRKDKLNSQLLSAFDMNQRQLPSRLLDEWMNIRPASHSVKLRTYVKQLNEDCRLRLRKFRKDGDGKARAIPLVGEMATFLSQDIVRMIISEETKKLITSAYYNEMQRSLAQYAGEENRRQFRAIVAELHLLDPSSGHPFLSATMETAHRYTEDFYKCYLEKKREWLAKTFYRPEQDENTKRRISVFFVPDGEARKLLPLLIRRRMKEQNDLQDWIRNKQAHPIDLPSHLFDSKIMELLKVKDGKKKWNEAFKDWWSTKYPDGMQPFYGLRRELNIHGKSVSYIPSDGKKFADCYTHLMEKTVQDKKRELRTAGKPVPPDLAADIKRSFHRAVNEREFMLRLVQEDDRLMLMAINKMMTDREEDILPGLKNIDSILDEENQFSLAVHAKVLEKEGEGGDNSLSLVPATIEIKSKRKDWSKYIRYRYDRRVPGLMSHFPEHKATLDEVKTLLGEYDRCRIKIFDWAFALEGAIMSDRDLKPYLHESSSREGKSGEHSTLVKMLVEKKGCLTPDESQYLILIRNKAAHNQFPCAAEMPLIYRDVSAKVGSIEGSSAKDLPEGSSLVDSLWKKYEMIIRKILPILDHENRFFGKLLNNMSQPINDL

SEQ ID NO: 134 - protein, 1135 aa, Porphyromonas gingivalis
MNTVPASENKGQSRTVEDDPQYFGLYLNLARENLIEVESHVRIKFGKKKLNEESLKQSLLCDHLLSVDRWTKVYGHSRRYLPFLHYFDPDSQIEKDHDSKTGVDPDSAQRLIRELYSLLDFLRNDFSHNRLDGTTFEHLEVSPDISSFITGTYSLACGRAQSRFADFFKPDDFVLAKNRKEQLISVADGKECLTVSGLAFFICLFLDREQASGMLSRIRGFKRTDENWARAVHETFCDLCIRHPHDRLESSNTKEALLLDMLNELNRCPRILYDMLPEEERAQFLPALDENSMNNLSENSLNEESRLLWDGSSDWAEALTKRIRHQDRFPYLMLRFIEEMDLLKGIRFRVDLGEIELDSYSKKVGRNGEYDRTITDHALAFGKLSDFQNEEEVSRMISGEASYPVRFSLFAPRYAIYDNKIGYCHTSDPVYPKSKTGEKRALSNPRSMGFISVHDLRKLLLMELLCEGSFSRMQSDFLRKANRILDETAEGKLQFSALFPEMRHRFIPPQNPKSKDRREKAETTLEKYKQEIKGRKDKLNSQLLSAFDMDQRQLPSRLLDEWMNIRPASHSVKLRTYVKQLNEDCRLRLQKFRKDGDGKARAIPLVGEMATFLSQDIVRMIISEETKKLITSAYYNEMQRSLAQYAGEENRHQFRAIVAELRLLDPSSGHPFLSATMETAHRYTEDFYKCYLEKKREWLAKTFYRPEQDENTKRRISVFFVPDGEARKLLPLLIRRRMKEQNDLQDWIRNKQAHPIDLPSHLFDSKVMELLKVKDGKKKWNEAFKDWWSTKYPDGMQPFYGLRRELNIHGKSVSYIPSDGKKFADCYTHLMEKTVRDKKRELRTAGKPVPPDLAAYIKRSFHRAVNEREFMLRLVQEDDRLMLMAINKIMTDREEDILPGLKNIDSILDKENQFSLAVHAKVLEKEGEGGDNSLSLVPATIEIKSKRKDWSKYIRYRYDRRVPGLMSHFPEHKATLDEVKTLLGEYDRCRIKIFDWAFALEGAIMSDRDLKPYLHESSSREGKSGEHSTLVKMLVEKKGCLTPDESQYLILIRNKAAHNQFPCAAEIPLIYRDVSAKVGSIEGSSAKDLPEGSSLVDSLWKKYEMIIRKILPILDPENRFFGKLLNNMSQPINDL

SEQ ID NO: 135 - protein, 1125 aa, Prevotella intermedia
MKMEDDKKTTESTNMLDNKHFWAAFLNLARHNVYITVNHINKVLELKNKKDQDIIIDNDQDILAIKTHWEKVNGDLNKTERLRELMTKHFPFLETAIYTKNKEDKEEVKQEKQAEAQSLESLKDCLFLFLEKLQEARNYYSHYKYSESTKEPMLEEGLLEKMYNIFDDNIQLVIKDYQHNKDINPDEDFKHLDRKGQFKYSFADNEGNITESGLLFFVSLFLEKKDAIWMQQKLTGFKDNRESKKKMTHEVFCRRRMLLPKLRLESTQTQDWILLDMLNELIRCPKSLYERLQGEYRKKFNVPFDSADEDYDAEQEPFKNTLVRHQDRFPYFALRYFDYNEIFTNLRFQIDLGTYHFSIYKKLIGGQKEDRHLTHKLYGFERIQEFAKQNRPDEWKALVKDLDTYETSNERYISETTPHYHLENQKIGIRFRNGNKEIWPSLKTNGENNEKSKYKLDKPYQAEAFLSVHELLPMMFYYLLLKKEEPNNDKKNASIVEGFIKREIRDMYKLYDAFANGEINNIGDLEKYCEDKGIPKRHLPKQMVAILYDEPKDMVKEAKRKQKEMVKDTKKLLATLEKQTQEEIEDGGRNIRLLKSGEIARWLVNDMMRFQPVQKDNEGNPLNNSKANSTEYQMLQRSLALYNKEEKPTRYFRQVNLINSSNPHPFLKWTKWEECNNILSFYRNYLTKKIEFLNKLKPEDWEKNQYFLKLKEPKTNRETLVQGWKNGFNLPRGIFTEPIREWFKRHQNDSKEYEKVEALKRVGLVTKVIPLFFKEEYFKEDAQKEINNCVQPFYSFPYNVGNIHKPDEKDFLPSEERKKLWGDKKDKFKGYKAKVKSKKLTDKEKEEYRSYLEFQSWNKFERELRLVRNQDIVTWLLCTELIDKMKVEGLNVEELQKLRLKDIDTDTAKQEKNNILNRIMPMQLPVTVYEIDDSHNIVKDRPLHTVYIEETKTKLLKQGNFKALVKDRRLNGLFSFVDTSSKAELKDKPISKSVVEYELGEYQNARIETIKDMLLLEKTLIKKYEKLPTDNFSDMLNGWLEGKDESDKARFQNDVKLLVAVRNAFSHNQYPMRNRIAFANINPFSLSSADISEEKKLDIANQLKDKTHKIIKKIIEIEKPIETKE

SEQ ID NO: 136 - protein, 1161 aa, Bacteroides bacterium
MENQTQKGKGIYYYYTKNEDKHYFGSFLNLANNNIEQIIEEFRIRLSLKDEKNIKEIINNYFTDKKSYTDWERGINILKEYLPVIDYLDLAITDKEFEKIDLKQKETAKRKYFRTNFSLLIDTIIDLRNFYTHYFHKPISINPDVAKFLDKNLLNVCLDIKKQKMKTDKTKQALKDGLDKELKKLIELKKAELKEKKIKTWNITENVEGAVYNDAFNHMVYKNNAGVTILKDYHKSILPDDKIDSELKLNFSISGLVFLLSMFLSKKEIEQFKSNLEGFKGKVIGENGEYEISKFNNSLKYMATHWIFSYLTFKGLKQRVKNTFDKETLLMQMIDELNKVPHEVYQTLSKEQQNEFLEDINEYVQDNEENKKSMENSIVVHPVIRKRYDDKFNYFAIRFLDEFANFPTLKFFVTAGNFVHDKREKQIQGSMLTSDRMIKEKINVFGKLTEIAKYKSDYFSNENTLETSEWELFPNPSYLLIQNNIPVHIDLIHNTEEAKQCQIAIDRIKCTTNPAKKRNTRKSKEEIIKIIYQKNKNIKYGDPTALLSSNELPALIYELLVNKKSGKELENIIVEKIVNQYKTIAGFEKGQNLSNSLITKKLKKSEPNEDKINAEKIILAINRELEITENKLNIIKNNRAEFRTGAKRKHIFYSKELGQEATWIAYDLKRFMPEASRKEWKGFHHSELQKFLAFYDRNKNDAKALLNMFWNFDNDQLIGNDLNSAFREFHFDKFYEKYLIKRDEILEGFKSFISNFKDEPKLLKKGIKDIYRVFDKRYYIIKSTNAQKEQLLSKPICLPRGIFDNKPTYIEGVKVESNSALFADWYQYTYSDKHEFQSFYDMPRDYKEQFEKFELNNIKSIQNKKNLNKSDKFIYFRYKQDLKIKQIKSQDLFIKLMVDELFNVVFKNNIELNLKKLYQTSDERFKNQLIADVQKNREKGDTSDNKMNENFIWNMTIPLSLCNGQIEEPKVKLKDIGKFRKLETDDKVIQLLEYDKSKVWKKLEIEDELENMPNSYERIRREKLLKGIQEFEHFLLEKEKFDGINHPKHFEQDLNPNFKTYVINGVLRKNSKLNYTEIDKLLDLEHISIKDIETSAKEIHLAYFLIHVRNKFGHNQLPKLEAFELMKKYYKKNNEETYAEYFHKVSSQIVNEFKNSLEKHS

SEQ ID NO: 137 - protein, 1165 aa, Chryseobacterium jejuense
MEKTQTGLGIYYDHTKLQDKYFFGGFFNLAQNNIDNVIKAFIIKFFPERKDKDINIAQFLDICFKDNDADSDFQKKNKFLRIHFPVIGFLTSDNDKAGFKKKFALLLKTISELRNFYTHYYHKSIEFPSELFELLDDIFVKTTSEIKKLKKKDDKTQQLLNKNLSEEYDIRYQQQIERLKELKAQGKRVSLTDETAIRNGVFNAAFNHLIYRDGENVKPSRLYQSSYSEPDPAENGISLSQNSILFLLSMFLERKETEDLKSRVKGFKAKIIKQGEEQISGLKFMATHWVFSYLCFKGIKQKLSTEFHEETLLIQIIDELSKVPDEVYSAFDSKTKEKFLEDINEYMKEGNADLSLEDSKVIHPVIRKRYENKFNYFAIRFLDEYLSSTSLKFQVHVGNYVHDRRVKHINGTGFQTERIVKDRIKVFGRLSNISNLKADYIKEQLELPNDSNGWEIFPNPSYIFIDNNVPIHVLADEATKKGIELFKDKRRKEQPEELQKRKGKISKYNIVSMIYKEAKGKDKLRIDEPLALLSLNEIPALLYQILEKGATPKDIELIIKNKLTERFEKIKNYDPETPAPASQISKRLRNNTTAKGQEALNAEKLSLLIEREIENTETKLSSIEEKRLKAKKEQRRNTPQRSIFSNSDLGRIAAWLADDIKRFMPAEQRKNWKGYQHSQLQQSLAYFEKRPQEAFLLLKEGWDTSDGSSYWNNWVMNSFLENNHFEKFYKNYLMKRVKYFSELAGNIKQHTHNTKFLRKFIKQQMPADLFPKRHYILKDLETEKNKVLSKPLVFSRGLFDNNPTFIKGVKVTENPELFAEWYSYGYKTEHVFQHFYGWERDYNELLDSELQKGNSFAKNSIYYNRESQLDLIKLKQDLKIKKIKIQDLFLKRIAEKLFENVFNYPTTLSLDEFYLTQEERAEKERIALAQSLREEGDNSPNIIKDDFIWSKTIAFRSKQIYEPAIKLKDIGKFNRFVLDDEESKASKLLSYDKNKIWNKEQLERELSIGENSYEVIRREKLFKEIQNLELQILSNWSWDGINHPREFEMEDQKNTRHPNFKMYLVNGILRKNINLYKEDEDFWLESLKENDFKTLPSEVLETKSEMVQLLFLVILIRNQFAHNQLPEIQFYNFIRKNYPEIQNNTVAELYLNLIKLAVQKLKDNS

SEQ ID NO: 138 - protein, 1156 aa, Chryseobacterium carnipullorum
MNTRVTGMGVSYDHTKKEDKHFFGGFLNLAQDNITAVIKAFCIKFDKNPMSSVQFAESCFTDKDSDTDFQNKVRYVRTHLPVIGYLNYGGDRNTFRQKLSTLLKAVDSLRNFYTHYYHSPLALSTELFELLDTVFASVAVEVKQHKMKDDKTRQLLSKSLAEELDIRYKQQLERLKELKEQGKNIDLRDEAGIRNGVLNAAFNHLIYKEGEIAKPTLSYSSFYYGADSAENGITISQSGLLFLLSMFLGKKEIEDLKSRIRGFKAKIVRDGEENISGLKFMATHWIFSYLSFKGMKQRLSTDFHEETLLIQIIDELSKVPDEVYHDFDTATREKFVEDINEYIREGNEDFSLGDSTIIHPVIRKRYENKFNYFAVRFLDEFIKFPSLRFQVHLGNFVHDRRIKDIHGTGFQTERVVKDRIKVFGKLSEISSLKTEYIEKELDLDSDTGWEIFPNPSYVFIDNNIPIYISTNKTFKNGSSEFIKLRRKEKPEEMKMRGEDKKEKRDIASMIGNAGSLNSKTPLAMLSLNEMPALLYEILVKKTTPEEIELIIKEKLDSHFENIKNYDPEKPLPASQISKRLRNNTTDKGKKVINPEKLIHLINKEIDATEAKFALLAKNRKELKEKFRGKPLRQTIFSNMELGREATWLADDIKRFMPDILRKNWKGYQHNQLQQSLAFFNSRPKEAFTILQDGWDFADGSSFWNGWIINSFVKNRSFEYFYEAYFEGRKEYFSSLAENIKQHTSNHRNLRRFIDQQMPKGLFENRHYLLENLETEKNKILSKPLVFPRGLFDTKPTFIKGIKVDEQPELFAEWYQYGYSTEHVFQNFYGWERDYNDLLESELEKDNDFSKNSIHYSRTSQLELIKLKQDLKIKKIKIQDLFLKLIAGHIFENIFKYPASFSLDELYLTQEERLNKEQEALIQSQRKEGDHSDNIIKDNFIGSKTVTYESKQISEPNVKLKDIGKFNRFLLDDKVKTLLSYNEDKVWNKNDLDLELSIGENSYEVIRREKLFKKIQNFELQTLTDWPWNGTDHPEEFGTTDNKGVNHPNFKMYVVNGILRKHTDWFKEGEDNWLENLNETHFKNLSFQELETKSKSIQTAFLIIMIRNQFAHNQLPAVQFFEFIQKKYPEIQGSTTSELYLNFINLAVVELLELLEK

SEQ ID NO: 139 - protein, 1036 aa, Chryseobacterium ureilyticum
METQILGNGISYDHTKTEDKHFFGGFLNTAQNNIDLLIKAYISKFESSPRKLNSVQFPDVCFKKNDSDADFQHKLQFIRKHLPVIQYLKYGGNREVLKEKFRLLLQAVDSLRNFYTHFYHKPIQLPNELLTLLDTIFGEIGNEVRQNKMKDDKTRHLLKKNLSEELDFRYQEQLERLRKLKSEGKKVDLRDTEAIRNGVLNAAFNHLIFKDAEDFKPTVSYSSYYYDSDTAENGISISQSGLLFLLSMFLGRREMEDLKSRVRGFKARIIKHEEQHVSGLKFMATHWVFSEFCFKGIKTRLNADYHEETLLIQLIDELSKVPDELYRSFDVATRERFIEDINEYIRDGKEDKSLIESKIVHPVIRKRYESKFNYFAIRFLDEFVNFPTLRFQVHAGNYVHDRRIKSIEGTGFKTERLVKDRIKVFGKLSTISSLKAEYLAKAVNITDDTGWELLPHPSYVFIDNNIPIHLTVDPSFKNGVKEYQEKRKLQKPEEMKNRQGGDKMHKPAISSKIGKSKDINPESPVALLSMNEIPALLYEILVKKASPEEVEAKIRQKLTAVFERIRDYDPKVPLPASQVSKRLRNNTDTLSYNKEKLVELANKEVEQTERKLALITKNRRECREKVKGKFKRQKVFKNAELGTEATWLANDIKRFMPEEQKKNWKGYQHSQLQQSLAFFESRPGEARSLLQAGWDFSDGSSFWNGWVMNSFARDNTFDGFYESYLNGRMKYFLRLADNIAQQSSTNKLISNFIKQQMPKGLFDRRLYMLEDLATEKNKILSKPLIFPRGIFDDKPTFKKGVQVSEEPEAFADWYSYGYDVKHKFQEFYAWDRDYEELLREELEKDTAFTKNSIHYSRESQIELLAKKQDLKVKKVRIQDLYLKLMAEFLFENVFGHELALPLDQFYLTQEERLKQEQEAIVQSQRPKGDDSPNIVKENFIWSKTIPFKSGRVFEPNVKLKDIGKFRNLLTDEKVDILLSYNNTEIGKQVIENELIIGAGSYEFIRREQLFKEIQQMKRLSLRSVRGMGVPIRLNLK

SEQ ID NO: 140 - protein, 1127 aa, Prevotella buccae
MQKQDKLFVDRKKNAIFAFPKYITIMENQEKPEPIYYELTDKHFWAAFLNLARHNVYTTINHINRRLEIAELKDDGYMMDIKGSWNEQAKKLDKKVRLRDLIMKHFPFLEAAAYEITNSKSPNNKEQREKEQSEALSLNNLKNVLFIFLEKLQVLRNYYSHYKYSEESPKPIFETSLLKNMYKVFDANVRLVKRDYMHHENIDMQRDFTHLNRKKQVGRTKNIIDSPNFHYHFADKEGNMTIAGLLFFVSLFLDKKDAIWMQKKLKGFKDGRNLREQMTNEVFCRSRISLPKLKLENVQTKDWMQLDMLNELVRCPKSLYERLREKDRESFKVPFDIFSDDYDAEEEPFKNTLVRHQDRFPYFVLRYFDLNEIFEQLRFQIDLGTYHFSIYNKRIGDEDEVRHLTHHLYGFARIQDFAQQNQPEVWRKLVKDLDYFEASQEPYIPKTAPHYHLENEKIGIKFCSTHNNLFPSLKTEKTCNGRSKFNLGTQFTAEAFLSVHELLPMMFYYLLLTKDYSRKESADKVEGIIRKEISNIYAIYDAFANGEINSIADLTCRLQKTNILQGHLPKQMISILEGRQKDMEKEAERKIGEMIDDTQRRLDLLCKQTNQKIRIGKRNAGLLKSGKIADWLVNDMMRFQPVQKDQNNIPINNSKANSTEYRMLQRALALFGSENFRLKAYFNQMNLVGNDNPHPFLAETQWEHQTNILSFYRNYLEARKKYLKGLKPQNWKQYQHFLILKVQKTNRNTLVTGWKNSFNLPRGIFTQPIREWFEKHNNSKRIYDQILSFDRVGFVAKAIPLYFAEEYKDNVQPFYDYPFNIGNKLKPQKGQFLDKKERVELWQKNKELFKNYPSEKKKTDLAYLDFLSWKKFERELRLIKNQDIVTWLMFKELFNMATVEGLKIGEIHLRDIDTNTANEESNNILNRIMPMKLPVKTYETDNKGNILKERPLATFYIEETETKVLKQGNFKVLAKDRRLNGLLSFAETTDIDLEKNPITKLSVDHELIKYQTTRISIFEMTLGLEKKLINKYPTLPTDSFRNMLERWLQCKANRPELKNYVNSLIAVRNAFSHNQYPMYDATLFAEVKKFTLFPSVDTKKIELNIAPQLLEIVGKAIKEIEKSENKN

SEQ ID NO: 141 - protein, 1135 aa, Porphyromonas gingivalis
MNTVPASENKGQSRTVEDDPQYFGLYLNLARENLIEVESHVRIKFGKKKLNEESLKQSLLCDHLLSVDRWTKVYGHSRRYLPFLHYFDPDSQIEKDHDSKTGVDPDSAQRLIRELYSLLDFLRNDFSHNRLDGTTFEHLEVSPDISSFITGTYSLACGRAQSRFADFFKPDDFVLAKNRKEQLISVADGKECLTVSGLAFFICLFLDREQASGMLSRIRGFKRTDENWARAVHETFCDLCIRHPHDRLESSNTKEALLLDMLNELNRCPRILYDMLPEEERAQFLPALDENSMNNLSENSLNEESRLLWDGSSDWAEALTKRIRHQDRFPYLMLRFIEEMDLLKGIRFRVDLGEIELDSYSKKVGRNGEYDRTITDHALAFGKLSDFQNEEEVSRMISGEASYPVRFSLFAPRYAIYDNKIGYCHTSDPVYPKSKTGEKRALSNPQSMGFISVHNLRKLLLMELLCEGSFSRMQSDFLRKANRILDETAEGKLQFSALFPEMRHRFIPPQNPKSKDRREKAETTLEKYKQEIKGRKDKLNSQLLSAFDMNQRQLPSRLLDEWMNIRPASHSVKLRTYVKQLNEDCRLRLRKFRKDGDGKARAIPLVGEMATFLSQDIVRMIISEETKKLITSAYYNEMQRSLAQYAGEENRRQFRAIVAELHLLDPSSGHPFLSATMETAHRYTEDFYKCYLEKKREWLAKTFYRPEQDENTKRRISVFFVPDGEARKLLPLLIRRRMKEQNDLQDWIRNKQAHPIDLPSHLFDSKIMELLKVKDGKKKWNEAFKDWWSTKYPDGMQPFYGLRRELNIHGKSVSYIPSDGKKFADCYTHLMEKTVQDKKRELRTAGKPVPPDLAADIKRSFHRAVNEREFMLRLVQEDDRLMLMAINKMMTDREEDILPGLKNIDSILDEENQFSLAVHAKVLEKEGEGGDNSLSLVPATIEIKSKRKDWSKYIRYRYDRRVPGLMSHFPEHKATLDEVKTLLGEYDRCRIKIFDWAFALEGAIMSDRDLKPYLHESSSREGKSGEHSTLVKMLVEKKGCLTPDESQYLILIRNKAAHNQFPCAAEMPLIYRDVSAKVGSIEGSSAKDLPEGSSLVDSLWKKYEMIIRKILPILDPENRFFGKLLNNMSQPINDL

SEQ ID NO: 142 - protein, 1175 aa, Porphyromonas gingivalis
MTEQNEKPYNGTYYTLEDKHFWAAFFNLARHNAYITLAHIDRQLAYSKADITNDEDILFFKGQWKNLDNDLERKARLRSLILKHFSFLEGAAYGKKLFESQSSGNKSSKKKELTKKEKEELQANALSLDNLKSILFDFLQKLKDFRNYYSHYRHPESSELPLFDGNMLQRLYNVFDVSVQRVKRDHEHNDKVDPHRHFNHLVRKGKKDKYGNNDNPFFKHHFVDREEKVTEAGLLFFVSLFLEKRDAIWMQKKIRGFKGGTEAYQQMTNEVFCRSRISLPKLKLESLRTDDWMLLDMLNELVRCPKSLYDRLREEDRARFRVPVDILSDEDDTDGTEEDPFKNTLVRHQDRFPYFALRYFDLKKVFTSLRFHIDLGTYHFAIYKKNIGEQPEDRHLTRNLYGFGRIQDFAEEHRPEEWKRLVRDLDYFETGDKPYITQTTPHYHIEKGKIGLRFVPEGQLLWPSPEVGATRTGRSKYAQDKRFTAEAFLSVHELMPMMFYYFLLREKYSEEASAEKVQGRIKRVIEDVYAVYDAFARDEINTRDELDACLADKGIRRGHLPRQMIAILSQEHKDMEEKVRKKLQEMIADTDHRLDMLDRQTDRKIRIGRKNAGLPKSGVIADWLVRDMMRFQPVAKDTSGKPLNNSKANSTEYRMLQRALALFGGEKERLTPYFRQMNLTGGNNPHPFLHETRWESHTNILSFYRSYLKARKAFLQSIGRSDREENHRFLLLKEPKTDRQTLVAGWKSEFHLPRGIFTEAVRDCLIEMGYDEVGSYKEVGFMAKAVPLYFERACKDRVQPFYDYPFNVGNSLKPKKGRFLSKEKRAEEWESGKERFRDLEAWSHSAARRIEDAFVGIEYASWENKKKIEQLLQDLSLWETFESKLKVKADKINIAKLKKEILEAKEHPYHDFKSWQKFERELRLVKNQDIITWMMCRDLMEENKVEGLDTGTLYLKDIRTDVQEQGSLNVLNHVKPMRLPVVVYRADSRGHVHKEEAPLATVYIEERDTKLLKQGNFKSFVKDRRLNGLFSFVDTGALAMEQYPISKLRVEYELAKYQTARVCAFEQTLELEESLLTRYPHLPDESFREMLESWSDPLLDKWPDLQREVRLLIAVRNAFSHNQYPMYDETIFSSIRKYDPSSLDAIEERMGLNIAHRLSEEVKLAKEMVERIIQA

SEQ ID NO: 143 - protein, 1125 aa, Prevotella pallens; identical to SEQ ID NO: 125

SEQ ID NO: 144 - protein, 1157 aa, Myroides odoratimimus; identical to SEQ ID NO: 126

SEQ ID NO: 145 - protein, 1157 aa, Myroides odoratimimus; identical to SEQ ID NO: 127

SEQ ID NO: 146 - protein, 1127 aa, Prevotella sp.
MQKQDKLFVDRKKNAIFAFPKYITIMENQEKPEPIYYELTDKHFWAAFLNLARHNVYTTINHINRRLEIAELKDDGYMMGIKGSWNEQAKKLDKKVRLRDLIMKHFPFLEAAAYEITNSKSPNNKEQREKEQSEALSLNNLKNVLFIFLEKLQVLRNYYSHYKYSEESPKPIFETSLLKNMYKVFDANVRLVKRDYMHHENIDMQRDFTHLNRKKQVGRTKNIIDSPNFHYHFADKEGNMTIAGLLFFVSLFLDKKDAIWMQKKLKGFKDGRNLREQMTNEVFCRSRISLPKLKLENVQTKDWMQLDMLNELVRCPKSLYERLREKDRESFKVPFDIFSDDYDAEEEPFKNTLVRHQDRFPYFVLRYFDLNEIFEQLRFQIDLGTYHFSIYNKRIGDEDEVRHLTHHLYGFARIQDFAPQNQPEEWRKLVKDLDHFETSQEPYISKTAPHYHLENEKIGIKFCSTHNNLFPSLKREKTCNGRSKFNLGTQFTAEAFLSVHELLPMMFYYLLLTKDYSRKESADKVEGIIRKEISNIYAIYDAFANNEINSIADLTCRLQKTNILQGHLPKQMISILEGRQKDMEKEAERKIGEMIDDTQRRLDLLCKQTNQKIRIGKRNAGLLKSGKIADWLVSDMMRFQPVQKDTNNAPINNSKANSTEYRMLQHALALFGSESSRLKAYFRQMNLVGNANPHPFLAETQWEHQTNILSFYRNYLEARKKYLKGLKPQNWKQYQHFLILKVQKTNRNTLVTGWKNSFNLPRGIFTQPIREWFEKHNNSKRIYDQILSFDRVGFVAKAIPLYFAEEYKDNVQPFYDYPFNIGNKLKPQKGQFLDKKERVELWQKNKELFKNYPSEKNKTDLAYLDFLSWKKFERELRLIKNQDIVTWLMFKELFKTTTVEGLKIGEIHLRDIDTNTANEESNNILNRIMPMKLPVKTYETDNKGNILKERPLATFYIEETETKVLKQGNFKVLAKDRRLNGLLSFAETTDIDLEKNPITKLSVDYELIKYQTTRISIFEMTLGLEKKLIDKYSTLPTDSFRNMLERWLQCKANRPELKNYVNSLIAVRNAFSHNQYPMYDATLFAEVKKFTLFPSVDTKKIELNIAPQLLEIVGKAIKEIEKSENKN

SEQ ID NO: 147 - protein, 1119 aa, Porphyromonas gingivalis
MTEQNERPYNGTYYTLEDKHFWAAFFNLARHNAYITLAHIDRQLAYSKADITNDEDILFFKGQWKNLDNDLERKARLRSLILKHFSFLEGAAYGKKLFESQSSGNKSSKKKELTKKEKEELQANALSLDNLKSILFDFLQKLKDFRNYYSHYRHPESSELPLFDGNMLQRLYNVFDVSVQRVKRDHEHNDKVDPHRHFNHLVRKGKKDRYGNNDNPFFKHHFVDREEKVTEAGLLFFVSLFLEKRDAIWMQKKIRGFKGGTETYQQMTNEVFCRSRISLPKLKLESLRTDDWMLLDMLNELVRCPKSLYDRLREEDRARFRVPVDILSDEDDTDGTEEDPFKNTLVRHQDRFPYFALRYFDLKKVFTSLRFHIDLGTYHFAIYKKNIGEQPEDRHLTRNLYGFGRIQDFAEEHRPEEWKRLVRDLDYFETGDKPYITQTTPHYHIEKGKIGLRFVPEGQHLWPSPEVGATRTGRSKYAQDKRLTAEAFLSVHELMPMMFYYFLLREKYSDEASAERVQGRIKRVIEDVYAVYDAFARGEINTRDELDACLADKGIRRGHLPRQMIGILSQEHKDMEEKVRKKLQEMIVDTDHRLDMLDRQTDRKIRIGRKNAGLPKSGVIADWLVRDMMRFQPVAKDTSGKPLNNSKANSTEYRMLQRALALFGGEKERLTPYFRQMNLTGGNNPHPFLHETRWESHTNILSFYRSYLKARKAFLQSIGRSDRVENHRFLLLKEPKTDRQTLVAGWKGEFHLPRGIFTEAVRDCLIEMGLDEVGSYKEVGFMAKAVPLYFERACKDRVQPFYDYPFNVGNSLKPKKGRFLSKEKRAEEWESGKERFRLAKLKKEILEAKEHPYLDFKSWQKFERELRLVKNQDIITWMICRDLMEENKVEGLDTGTLYLKDIRTDVQEQGNLNVLNRVKPMRLPVVVYRADSRGHVHKEQAPLATVYIEERDTKLLKQGNFKSFVKDRRLNGLFSFVDTGALAMEQYPISKLRVEYELAKYQTARVCAFEQTLELEESLLTRYPHLPDKNFRKMLESWSDPLLDKWPDLHGNVRLLIAVRNAFSHNQYPMYDEAVFSSIRKYDPSSPDAIEERMGLNIAHRLSEEVKQAKEMAERIIQA

SEQ ID NO: 148 - protein, 1154 aa, Paludibacter propionicigenes
MKTSANNIYFNGINSFKKIFDSKGAIAPIAEKSCRNFDIKAQNDVNKEQRIHYFAVGHTFKQLDTENLFEYVLDENLRAKRPTRFISLQQFDKEFIENIKRLISDIRNINSHYIHRFDPLKIDAVPTNIIDFLKESFELAVIQIYLKEKGINYLQFSENPHADQKLVAFLHDKFLPLDEKKTSMLQNETPQLKEYKEYRKYFKTLSKQAAIDQLLFAEKETDYIWNLFDSHPVLTISAGKYLSFYSCLFLLSMFLYKSEANQLISKIKGFKKNTTEEEKSKREIFTFFSKRFNSMDIDSEENQLVKFRDLILYLNHYPVAWNKDLELDSSNPAMTDKLKSKIIELEINRSFPLYEGNERFATFAKYQIWGKKHLGKSIEKEYINASFTDEEITAYTYETDTCPELKDAHKKLADLKAAKGLFGKRKEKNESDIKKTETSIRELQHEPNPIKDKLIQRIEKNLLTVSYGRNQDRFMDFSARFLAEINYFGQDASFKMYHFYATDEQNSELEKYELPKDKKKYDSLKFHQGKLVHFISYKEHLKRYESWDDAFVIENNAIQLKLSFDGVENTVTIQRALLIYLLEDALRNIQNNTAENAGKQLLQEYYSHNKADLSAFKQILTQQDSIEPQQKTEFKKLLPRRLLNNYSPAINHLQTPHSSLPLILEKALLAEKRYCSLVVKAKAEGNYDDFIKRNKGKQFKLQFIRKAWNLMYFRNSYLQNVQAAGHHKSFHIERDEFNDFSRYMFAFEELSQYKYYLNEMFEKKGFFENNEFKILFQSGTSLENLYEKTKQKFEIWLASNTAKTNKPDNYHLNNYEQQFSNQLFFINLSHFINYLKSTGKLQTDANGQIIYEALNNVQYLIPEYYYTDKPERSESKSGNKLYNKLKATKLEDALLYEMAMCYLKADKQIADKAKHPITKLLTSDVEFNITNKEGIQLYHLLVPFKKIDAFIGLKMHKEQQDKKHPTSFLANIVNYLELVKNDKDIRKTYEAFSTNPVKRTLTYDDLAKIDGHLISKSIKFTNVTLELERYFIFKESLIVKKGNNIDFKYIKGLRNYYNNEKKKNEGIRNKAFHFGIPDSKSYDQLIRDAEVMFIANEVKPTHATKYTDLNKQLHTVCDKLMETVHNDYFSKEGDGKKKREAAGQKYFENIISAK

SEQ ID NO: 149 - protein, 1119 aa, Porphyromonas gingivalis
MTEQNEKPYNGTYYTLEDKHFWAAFFNLARHNAYITLAHIDRQLAYSKADITNDEDILFFKGQWKNLDNDLERKARLRSLILKHFSFLEGAAYGKKLFESQSSGNKSSKNKELTKKEKEELQANALSLDNLKSILFDFLQKLKDFRNYYSHYRHPESSELPLFDGNMLQRLYNVFDVSVQRVKRDHEHNDKVDPHRHFNHLVRKGKKDRYGNNDNPFFKHHFVDREGTVTEAGLLFFVSLFLEKRDAIWMQKKIRGFKGGTETYQQMTNEVFCRSRISLPKLKLESLRTDDWMLLDMLNELVRCPKSLYDRLREEDRARFRVPVDILSDEEDTDGAEEDPFKNTLVRHQDRFPYFALRYFDLKKVFTSLRFQIDLGTYHFAIYKKNIGEQPEDRHLTRNLYGFGRIQDFAEEHRPEEWKRLVRDLDYFETGDKPYITQTTPHYHIEKGKIGLRFVPEGQHLWPSPEVGATRTGRSKYAQDKRFTAEAFLSAHELMPMMFYYFLLREKYSEEASAERVQGRIKRVIEDVYAVYDAFARDEINTRDELDACLADKGIRRGHLPRQMIGILSQEHKDMEEKIRKKLQEMMADTDHRLDMLDRQTDRKIRIGRKNAGLPKSGVIADWLVRDMMRFQPVAKDTSGKPLNNSKANSTEYRMLQRALALFGGEKERLTPYFRQMNLTGGNNPHPFLHETRWESHTNILSFYRSYLKARKAFLQSIGRSDRVENHRFLLLKEPKTDRQTLVAGWKGEFHLPRGIFTEAVRDCLIEMGLDEVGSYKEVGFMAKAVPLYFERACKDWVQPFYNYPFNVGNSLKPKKGRFLSKEKRAEEWESGKERFRLAKLKKEILEAKEHPYLDFKSWQKFERELRLVKNQDIITWMICGDLMEENKVEGLDTGTLYLKDIRTDVQEQGSLNVLNRVKPMRLPVVVYRADSRGHVHKEQAPLATVYIEERDTKLLKQGNFKSFVKDRRLNGLFSFVDTGALAMEQYPISKLRVEYELAKYQTARVCAFEQTLELEESLLTRCPHLPDKNFRKMLESWSDPLLDKWPDLHRKVRLLIAVRNAFSHNQYPMYDEAVFSSIRKYDPSFPDAIEERMGLNIAHRLSEEVKQAKETVERIIQA

SEQ ID NO: 150 - protein, 1179 aa, Flavobacterium columnare
MSSKNESYNKQKTFNHYKQEDKYFFGGFLNNADDNLRQVGKEFKTRINFNHNNNELASVFKDYFNKEKSVAKREHALNLLSNYFPVLERIQKHTNHNFEQTREIFELLLDTIKKLRDYYTHHYHKPITINPKIYDFLDDTLLDVLITIKKKKVKNDTSRELLKEKLRPELTQLKNQKREELIKKGKKLLEENLENAVFNHCLRPFLEENKTDDKQNKTVSLRKYRKSKPNEETSITLTQSGLVFLMSFFLHRKEFQVFTSGLEGFKAKVNTIKEEEISLNKNNIVYMITHWSYSYYNFKGLKHRIKTDQGVSTLEQNNTTHSLTNTNTKEALLTQIVDYLSKVPNEIYETLSEKQQKEFEEDINEYMRENPENEDSTFSSIVSHKVIRKRYENKFNYFAMRFLDEYAELPTLRFMVNFGDYIKDRQKKILESIQFDSERIIKKEIHLFEKLSLVTEYKKNVYLKETSNIDLSRFPLFPNPSYVMANNNIPFYIDSRSNNLDEYLNQKKKAQSQNKKRNLTFEKYNKEQSKDAIIAMLQKEIGVKDLQQRSTIGLLSCNELPSMLYEVIVKDIKGAELENKIAQKIREQYQSIRDFTLDSPQKDNIPTTLIKTINTDSSVTFENQPIDIPRLKNAIQKELTLTQEKLLNVKEHEIEVDNYNRNKNTYKFKNQPKNKVDDKKLQRKYVFYRNEIRQEANWLASDLIHFMKNKSLWKGYMHNELQSFLAFFEDKKNDCIALLETVFNLKEDCILTKGLKNLFLKHGNFIDFYKEYLKLKEDFLNTESTFLENGLIGLPPKILKKELSKRFKYIFIVFQKRQFIIKELEEKKNNLYADAINLSRGIFDEKPTMIPFKKPNPDEFASWFVASYQYNNYQSFYELTPDIVERDKKKKYKNLRAINKVKIQDYYLKLMVDTLYQDLFNQPLDKSLSDFYVSKAEREKIKADAKAYQKRNDSSLWNKVIHLSLQNNRITANPKLKDIGKYKRALQDEKIATLLTYDDRTWTYALQKPEKENENDYKELHYTALNMELQEYEKVRSKELLKQVQELEKQILEEYTDFLSTQIHPADFEREGNPNFKKYLAHSILENEDDLDKLPEKVEAMRELDETITNPIIKKAIVLIIIRNKMAHNQYPPKFIYDLANRFVPKKEEEYFATYFNRVFETITKELWENKEKKDKTQV

SEQ ID NO: 151 - protein, 1145 aa, Psychroflexus torquis
MESIIGLGLSFNPYKTADKHYFGSFLNLVENNLNAVFAEFKERISYKAKDENISSLIEKHFIDNMSIVDYEKKISILNGYLPIIDFLDDELENNLNTRVKNFKKNFIILAEAIEKLRDYYTHFYHDPITFEDNKEPLLELLDEVLLKTILDVKKKYLKTDKTKEILKDSLREEMDLLVIRKTDELREKKKTNPKIQHTDSSQIKNSIFNDAFQGLLYEDKGNNKKTQVSHRAKTRLNPKDIHKQEERDFEIPLSTSGLVFLMSLFLSKKEIEDFKSNIKGFKGKVVKDENHNSLKYMATHRVYSILAFKGLKYRIKTDTFSKETLMMQMIDELSKVPDCVYQNLSETKQKDFIEDWNEYFKDNEENTENLENSRVVHPVIRKRYEDKFNYFAIRFLDEFANFKTLKFQVFMGYYIHDQRTKTIGTTNITTERTVKEKINVFGKLSKMDNLKKHFFSQLSDDENTDWEFFPNPSYNFLTQADNSPANNIPIYLELKNQQIIKEKDAIKAEVNQTQNRNPNKPSKRDLLNKILKTYEDFHQGDPTAILSLNEIPALLHLFLVKPNNKTGQQIENIIRIKIEKQFKAINHPSKNNKGIPKSLFADTNVRVNAIKLKKDLEAELDMLNKKHIAFKENQKASSNYDKLLKEHQFTPKNKRPELRKYVFYKSEKGEEATWLANDIKRFMPKDFKTKWKGCQHSELQRKLAFYDRHTKQDIKELLSGCEFDHSLLDINAYFQKDNFEDFFSKYLENRIETLEGVLKKLHDFKNEPTPLKGVFKNCFKFLKRQNYVTESPEIIKKRILAKPTFLPRGVFDERPTMKKGKNPLKDKNEFAEWFVEYLENKDYQKFYNAEEYRMRDADFKKNAVIKKQKLKDFYTLQMVNYLLKEVFGKDEMNLQLSELFQTRQERLKLQGIAKKQMNKETGDSSENTRNQTYIWNKDVPVSFFNGKVTIDKVKLKNIGKYKRYERDERVKTFIGYEVDEKWMMYLPHNWKDRYSVKPINVIDLQIQEYEEIRSHELLKEIQNLEQYIYDHTTDKNILLQDGNPNFKMYVLNGLLIGIKQVNIPDFIVLKQNTNFDKIDFTGIASCSELEKKTIILIAIRNKFAHNQLPNKMIYDLANEFLKIEKNETYANYYLKVLKKMISDLA

SEQ ID NO: 152 - protein, 948 aa, Riemerella anatipestifer
MFFSFHNAQRVIFKHLYKAFDASLRMVKEDYKAHFTVNLTRDFAHLNRKGKNKQDNPDFNRYRFEKDGFFTESGLLFFTNLFLDKRDAYWMLKKVSGFKASHKQREKMTTEVFCRSRILLPKLRLESRYDHNQMLLDMLSELSRCPKLLYEKLSEENKKHFQVEADGFLDEIEEEQNPFKDTLIRHQDRFPYFALRYLDLNESFKSIRFQVDLGTYHYCIYDKKIGDEQEKRHLTRTLLSFGRLQDFTEINRPQEWKALTKDLDYKETSNQPFISKTTPHYHITDNKIGFRLGTSKELYPSLEIKDGANRIAKYPYNSGFVAHAFISVHELLPLMFYQHLTGKSEDLLKETVRHIQRIYKDFEEERINTIEDLEKANQGRLPLGAFPKQMLGLLQNKQPDLSEKAKIKIEKLIAETKLLSHRLNTKLKSSPKLGKRREKLIKTGVLADWLVKDFMRFQPVAYDAQNQPIKSSKANSTEFWFIRRALALYGGEKNRLEGYFKQTNLIGNTNPHPFLNKFNWKACRNLVDFYQQYLEQREKFLEAIKHQPWEPYQYCLLLKVPKENRKNLVKGWEQGGISLPRGLFTEAIRETLSKDLTLSKPIRKEIKKHGRVGFISRAITLYFKEKYQDKHQSFYNLSYKLEAKAPLLKKEEHYEYWQQNKPQSPTESQRLELHTSDRWKDYLLYKRWQHLEKKLRLYRNQDIMLWLMTLELTKNHFKELNLNYHQLKLENLAVNVQEADAKLNPLNQTLPMVLPVKVYPTTAFGEVQYHETPIRTVYIREEQTKALKMGNFKALVKDRRLNGLFSFIKEENDTQKHPISQLRLRRELEIYQSLRVDAFKETLSLEEKLLNKHASLSSLENEFRTLLEEWKKKYAASSMVTDKHIAFIASVRNAFCHNQYPFYKETLHAPILLFTVAQPTTEEKDGLGIAEALLKVLREYCEIVKSQI

SEQ ID NO: 153 - protein, 1139 aa, Prevotella pleuritidis
MENDKRLEESACYTLNDKHFWAAFLNLARHNVYITVNHINKTLELKNKKNQEIIIDNDQDILAIKTHWAKVNGDLNKTDRLRELMIKHFPFLEAAIYSNNKEDKEEVKEEKQAKAQSFKSLKDCLFLFLEKLQEARNYYSHYKYSESSKEPEFEEGLLEKMYNTFDASIRLVKEDYQYNKDIDPEKDFKHLERKEDFNYLFTDKDNKGKITKNGLLFFVSLFLEKKDAIWMQQKFRGFKDNRGNKEKMTHEVFCRSRMLLPKIRLESTQTQDWILLDMLNELIRCPKSLYERLQGAYREKFKVPFDSIDEDYDAEQEPFRNTLVRHQDRFPYFALRYFDYNEIFKNLRFQIDLGTYHFSIYKKLIGGKKEDRHLTHKLYGFERIQEFTKQNRPDKWQAIIKDLDTYETSNERYISETTPHYHLENQKIGIRFRNDNNDIWPSLKTNGEKNEKSKYNLDKPYQAEAFLSVHELLPMMFYYLLLKMENTDNDKEDNEVGTKKKGNKNNKQEKHKIEEIIENKIKDIYALYDAFTNGEINSIDELAEQREGKDIEIGHLPKQLIVILKNKSKDMAEKANRKQKEMIKDTKKRLATLDKQVKGEIEDGGRNIRLLKSGEIARWLVNDMMRFQPVQKDNEGKPLNNSKANSTEYQMLQRSLALYNKEEKPTRYFRQVNLIKSSNPHPFLEDTKWEECYNILSFYRNYLKAKIKFLNKLKPEDWKKNQYFLMLKEPKTNRKTLVQGWKNGFNLPRGIFTEPIKEWFKRHQNDSEEYKKVEALDRVGLVAKVIPLFFKEEYFKEDAQKEINNCVQPFYSFPYNVGNIHKPEEKNFLHCEERRKLWDKKKDKFKGYKAKEKSKKMTDKEKEEHRSYLEFQSWNKFERELRLVRNQDILTWLLCTKLIDKLKIDELNIEELQKLRLKDIDTDTAKKEKNNILNRVMPMRLPVTVYEIDKSFNIVKDKPLHTVYIEETGTKLLKQGNFKALVKDRRLNGLFSFVKTSSEAESKSKPISKLRVEYELGAYQKARIDIIKDMLALEKTLIDNDENLPTNKFSDMLKSWLKGKGEANKARLQNDVGLLVAVRNAFSHNQYPMYNSEVFKGMKLLSLSSDIPEKEGLGIAKQLKDKIKETIERIIEIEKEIRN

SEQ ID NO: 154 - protein, 1135 aa, Porphyromonas gingivalis; identical to SEQ ID NO: 132

SEQ ID NO: 155 - protein, 1135 aa, Porphyromonas gingivalis
MNTVPASENKGQSRTVEDDPQYFGLYLNLARENLIEVESHVRIKFGKKKLNEESLKQSLLCDHLLSVDRWTKVYGHSRRYLPFLHYFDPDSQIEKDHDSKTGVDPDSAQRLIRELYSLLDFLRNDFSHNRLDGTTFEHLEVSPDISSFITGTYSLACGRAQSRFADFFKPDDFVLAKNRKEQLISVADGKECLTVSGLAFFICLFLDREQASGMLSRIRGFKRTNENWARAVHETFCDLCIRHPHDRLESSNTKEALLLDMLNELNRCPRILYDMLPEEERAQFLPALDENSMNNLSENSLNEESRLLWDGSSDWAEALTKRIRHQDRFPYLMLRFIEEMDLLKGIRFRVDLGEIELDSYSKKVGRNGEYDRTITDHALAFGKLSDFQNEEEVSRMISGEASYPVRFSLFAPRYAIYDNKIGYCHTSDPVYPKSKTGEKRALSNPQSMGFISVHDLRKLLLMELLCEGSFSRMQSGFLRKANRILDETAEGKLQFSALFPEMRHRFIPPQNPKSKDRREKAETTLEKYKQEIKGRKDKLNSQLLSAFDMNQRQLPSRLLDEWMNIRPASHSVKLRTYVKQLNEDCRLRLRKFRKDGDGKARAIPLVGEMATFLSQDIVRMIISEETKKLITSAYYNEMQRSLAQYAGEENRRQFRAIVAELHLLDPSSGHPFLSATMETAHRYTEDFYKCYLEKKREWLAKTFYRPEQDENTKRRISVFFVPDGEARKLLPLLIRRRMKEQNDLQDWIRNKQAHPIDLPSHLFDSKIMELLKVKDGKKKWNEAFKDWWSTKYPDGMQPFYGLRRELNIHGKSVSYIPSDGKKFADCYTHLMEKTVQDKKRELRTAGKPVPPDLAADIKRSFHRAVNEREFMLRLVQEDDRLMLMAINKMMTDREEDILPGLKNIDSILDKENQFSLAVHAKVLEKEGEGGDNSLSLVPATIEIKSKRKDWSKYIRYRYDRRVPGLMSHFPEHKATLDEVKTLLGEYDRCRIKIFDWAFALEGAIMSDRDLKPYLHESSSREGKSGEHSTLVKMLVEKKGCLTPDESQYLILIRNKAAHNQFPCAAEMPLIYRDVSAKVGSIEGSSAKDLPEGSSLVDSLWKKYEMIIRKILPILDHENRFFGKLLNNMSQPINDL

SEQ ID NO: 156 - protein, 1135 aa, Porphyromonas gingivalis; identical to SEQ ID NO: 133

SEQ ID NO: 157 - protein, 1135 aa, Porphyromonas gingivalis; identical to SEQ ID NO: 134

SEQ ID NO: 158 - protein, 1135 aa, Porphyromonas gingivalis
MNTVPASENKGQSRTVEDDPQYFGLYLNLARENLIEVESHVRIKFGKKKLNEESLKQSLLCDHLLSVDRWTKVYGHSRRYLPFLHYFDPDSQIEKDHDSKTGVDPDSAQRLIRELYSLLDFLRNDFSHNRLDGTTFEHLEVSPDISSFITGTYSLACGRAQSRFADFFKPDDFVLAKNRKEQLISVADGKECLTVSGLAFFICLFLDREQASGMLSRIRGFKRTDENWARAVHETFCDLCIRHPHDRLESSNTKEALLLDMLNELNRCPRILYDMLPEEERAQFLPALDENSMNNLSENSLNEESRLLWDGSSDWAEALTKRIRHQDRFPYLMLRFIEEMDLLKGIRFRVDLGEIELDSYSKKVGRNGEYDRTITDHALAFGKLSDFQNEEEVSRMISGEASYPVRFSLFAPRYAIYDNKIGYCHTSDPVYPKSKTGEKRALSNPRSMGFISVHDLRKLLLMELLCEGSFSRMQSDFLRKANRILDETAEGKLQFSALFPEMRHRFIPPQNPKSKDRREKAETTLEKYKQEIKGRKDKLNSQLLSAFDMNQRQLPSRLLDEWMNIRPASHSVKLRTYVKQLNEDCRLRLRKFRKDGDGKARAIPLVGEMATFLSQDIVRMIISEETKKLITSAYYNEMQRSLAQYAGEENRRQFRAIVAELHLLDPSSGHPFLSATMETAHRYTEDFYKCYLEKKREWLAKTFYRPEQDENTKRRISVFFVPDGEARKLLPLLIRRRMKEQNDLQDWIRNKQAHPIDLPSHLFDSKIMELLKVKDGKKKWNEAFKDWWSTKYPDGMQPFYGLRRELNIHGKSVSYIPSDGKKFADCYTHLMEKTVQDKKRELRTAGKPVPPDLAADIKRSFHRAVNEREFMLRLVQEDDRLMLMAINKMMTDREEDILPGLKNIDSILDEENQFSLAVHAKVLEKEGEGGDNSLSLVPATIEIKSKRKDWSKYIRYRYDRRVPGLMSHFPEHKATLDEVKTLLGEYDRCRIKIFDWAFALEGAIMSDRDLKPYLHESSSREGKSGEHSTLVKMLVEKKGCLTPDESQYLILIRNKAAHNQFPCAAEMPLIYRDVSAKVGSIEGSSAKDLPEGSSLVDSLWKKYEMIIRKILPILDPENRFFGKLLNNMSQPINDL

SEQ ID NO: 159 - protein, 1133 aa, Prevotella falsenii
MKNDNNSTKSTDYTLGDKHFWAAFLNLARHNVYITVNHINKVLELKNKKDQEIIIDNDQDILAIKTLWGKVDTDINKKDRLRELIMKHFPFLEAATYQQSSTNNTKQKEEEQAKAQSFESLKDCLFLFLEKLREARNYYSHYKHSKSLEEPKLEEKLLENMYNIFDTNVQLVIKDYEHNKDINPEEDFKHLGRAEGEFNYYFTRNKKGNITESGLLFFVSLFLEKKDAIWAQTKIKGFKDNRENKQKMTHEVFCRSRMLLPKLRLESTQTQDWILLDMLNELIRCPKSLYKRLQGEKREKFRVPFDPADEDYDAEQEPFKNTLVRHQDRFPYFALRYFDYNEIFTNLRFQIDLGTYHFSIYKKQIGDKKEDRHLTHKLYGFERIQEFAKENRPDEWKALVKDLDTFEESNEPYISETTPHYHLENQKIGIRNKNKKKKKTIWPSLETKTTVNERSKYNLGKSFKAEAFLSVHELLPMMFYYLLLNKEEPNNGKINASKVEGIIEKKIRDIYKLYGAFANEEINNEEELKEYCEGKDIAIRHLPKQMIAILKNEYKDMAKKAEDKQKKMIKDTKKRLAALDKQVKGEVEDGGRNIKPLKSGRIASWLVNDMMRFQPVQRDRDGYPLNNSKANSTEYQLLQRTLALFGSERERLAPYFRQMNLIGKDNPHPFLKDTKWKEHNNILSFYRSYLEAKKNFLGSLKPEDWKKNQYFLKLKEPKTNRETLVQGWKNGFNLPRGIFTEPIREWFIRHQNESEEYKKVKDFDRIGLVAKVIPLFFKEDYQKEIEDYVQPFYGYPFNVGNIHNSQEGTFLNKKEREELWKGNKTKFKDYKTKEKNKEKTNKDKFKKKTDEEKEEFRSYLDFQSWKKFERELRLVRNQDIVTWLLCMELIDKLKIDELNIEELQKLRLKDIDTDTAKKEKNNILNRIMPMELPVTVYETDDSNNIIKDKPLHTIYIKEAETKLLKQGNFKALVKDRRLNGLFSFVETSSEAELKSKPISKSLVEYELGEYQRARVEIIKDMLRLEETLIGNDEKLPTNKFRQMLDKWLEHKKETDDTDLKNDVKLLTEVRNAFSHNQYPMRDRIAFANIKPFSLSSANTSNEEGLGIAKKLKDKTKETIDRIIEIEEQTATKR

SEQ ID NO: 160 - protein, 1116 aa, Prevotella pleuritidis
MENDKRLEESTCYTLNDKHFWAAFLNLARHNVYITINHINKLLEIRQIDNDEKVLDIKALWQKVDKDINQKARLRELMIKHFPFLEAAIYSNNKEDKEEVKEEKQAKAQSFKSLKDCLFLFLEKLQEARNYYSHYKSSESSKEPEFEEGLLEKMYNTFGVSIRLVKEDYQYNKDIDPEKDFKHLERKEDFNYLFTDKDNKGKITKNGLLFFVSLFLEKKDAIWMQQKLRGFKDNRGNKEKMTHEVFCRSRMLLPKIRLESTQTQDWILLDMLNELIRCPKSLYERLQGAYREKFKVPFDSIDEDYDAEQEPFRNTLVRHQDRFPYFALRYFDYNEIFKNLRFQIDLGTYHFSIYKKLIGDNKEDRHLTHKLYGFERIQEFAKQKRPNEWQALVKDLDIYETSNEQYISETTPHYHLENQKIGIRFKNKKDKIWPSLETNGKENEKSKYNLDKSFQAEAFLSIHELLPMMFYDLLLKKEEPNNDEKNASIVEGFIKKEIKRMYAIYDAFANEEINSKEGLEEYCKNKGFQERHLPKQMIAILTNKSKNMAEKAKRKQKEMIKDTKKRLATLDKQVKGEIEDGGRNIRLLKSGEIARWLVNDMMRFQSVQKDKEGKPLNNSKANSTEYQMLQRSLALYNKEQKPTPYFIQVNLIKSSNPHPFLEETKWEECNNILSFYRSYLEAKKNFLESLKPEDWKKNQYFLMLKEPKTNRKTLVQGWKNGFNLPRGIFTEPIKEWFKRHQNDSEEYKKVEALDRVGLVAKVIPLFFKEEYFKEDAQKEINNCVQPFYSFPYNVGNIHKPEEKNFLHCEERRKLWDKKKDKFKGYKAKEKSKKMTDKEKEEHRSYLEFQSWNKFERELRLVRNQDIVTWLLCTELIDKLKIDELNIEELQKLRLKDIDTDTAKKEKNNILNRIMPMQLPVTVYEIDKSFNIVKDKPLHTIYIEETGTKLLKQGNFKALVKDRRLNGLFSFVKTSSEAESKSKPISKLRVEYELGAYQKARIDIIKDMLALEKTLIDNDENLPTNKFSDMLKSWLKGKGEANKARLQNDVDLLVAIRNAFSHNQYPMYNSEVFKGMKLLSLSSDIPEKEGLGIAKQLKDKIKETIERIIEIEKEIRN

SEQ ID NO: 161 - protein, 1119 aa, Porphyromonas gingivalis
MTEQNERPYNGTYYTLEDKHFWAAFFNLARHNAYITLAHIDRQLAYSKADITNDEDILFFKGQWKNLDNDLERKARLRSLILKHFSFLEGAAYGKKLFESQSSGNKSSKKKELTKKEKEELQANALSLDNLKSILFDFLQKLKDFRNYYSHYRHPESSELPLFDGNMLQRLYNVFDVSVQRVKRDHEHNDKVDPHRHFNHLVRKGKKDRYGNNDNPFFKHHFVDREGTVTEAGLLFFVSLFLEKRDAIWMQKKIRGFKGGTEAYQQMTNEVFCRSRISLPKLKLESLRTDDWMLLDMLNELVRCPKSLYDRLREEDRARFRVPIDILSDEDDTDGTEEDPFKNTLVRHQDRFPYFALRYFDLKKVFTSLRFHIDLGTYHFAIYKKNIGEQPEDRHLTRNLYGFGRIQDFAEEHRPEEWKRLVRDLDYFETGDKPYITQTTPHYHIEKGKIGLRFVPEGQHLWPSPEVGATRTGRSKYAQDKRLTAEAFLSVHELMPMMFYYFLLREKYSEEVSAEKVQGRIKRVIEDVYAVYDAFARGEIDTLDRLDACLADKGIRRGHLPRQMIAILSQEHKDMEEKVRKKLQEMIADTDHRLDMLDRQTDRKIRIGRKNAGLPKSGVIADWLVRDMMRFQPVAKDTSGKPLNNSKANSTEYRMLQRALALFGGEKERLTPYFRQMNLTGGNNPHPFLHETRWESHTNILSFYRSYLKARKAFLQSIGRSDREENHRFLLLKEPKTDRQTLVAGWKSEFHLPRGIFTEAVRDCLIEMGYDEVGSYKEVGFMAKAVPLYFERACKDRVQPFYDYPFNVGNSLKPKKGRFLSKEKRAEEWESGKERFRLAKLKKEILEAKEHPYLDFKSWQKFERELRLVKNQDIITWMMCRDLMEENKVEGLDTGTLYLKDIRTDVHEQGSLNVLNRVKPMRLPVVVYRADSRGHVHKEQAPLATVYIEERDTKLLKQGNFKSFVKDRRLNGLFSFVDTGALAMEQYPISKLRVEYELAKYQTARVCAFEQTLELEESLLTRYPHLPDKNFRKMLESWSDPLLDKWPDLHRKVRLLIAVRNAFSHNQYPMYDEAVFSSIRKYDPSSPDAIEERMGLNIAHRLSEEVKQAKEMAERIIQV

SEQ ID NO: 162 - protein, 1175 aa, Porphyromonas gulae
MTEQSERPYNGTYYTLEDKHFWAAFLNLARHNAYITLTHIDRQLAYSKADITNDQDVLSFKALWKNLDNDLERKSRLRSLILKHFSFLEGAAYGKKLFESKSSGNKSSKNKELTKKEKEELQANALSLDNLKSILFDFLQKLKDFRNYYSHYRHSGSSELPLFDGNMLQRLYNVFDVSVQRVKRDHEHNDKVDPHRHFNHLVRKGKKDRYGHNDNPSFKHHFVDSEGMVTEAGLLFFVSLFLEKRDAIWMQKKIRGFKGGTETYQQMTNEVFCRSRISLPKLKLESLRMDDWMLLDMLNELVRCPKPLYDRLREDDRACFRVPVDILPDEDDTDGGGEDPFKNTLVRHQDRFPYFALRYFDLKKVFTSLRFHIDLGTYHFAIYKKMIGEQPEDRHLTRNLYGFGRIQDFAEEHRPEEWKRLVRDLDYFETGDKPYISQTSPHYHIEKGKIGLRFMPEGQHLWPSPEVGTTRTGRSKYAQDKRLTAEAFLSVHELMPMMFYYFLLREKYSEEVSAEKVQGRIKRVIEDVYAIYDAFARDEINTLKELDACLADKGIRRGHLPKQMIAILSQEHKNMEEKVRKKLQEMIADTDHRLDMLDRQTDRKIRIGRKNAGLPKSGVIADWLVRDMMRFQPVAKDASGKPLNNSKANSTEYRMLQRALALFGGEKERLTPYFRQMNLTGGNNPHPFLHDTRWESHTNILSFYRSYLRARKAFLERIGRSDRMENRPFLLLKEPKTDRQTLVAGWKSEFHLPRGIFTEAVRDCLIEMGYDEVGSYREVGFMAKAVPLYFERACEDRVQPFYDSPFNVGNSLKPKKGRFLSKEERAEEWERGKERFRDLEAWSHSAARRIEDAFAGIEYASPGNKKKIEQLLRDLSLWEAFESKLKVRADKINLAKLKKEILEAQEHPYHDFKSWQKFERELRLVKNQDIITWMMCRDLMEENKVEGLDTGTLYLKDIRTNVQEQGSLNVLNHVKPMRLPVVVYRADSRGHVHKEEAPLATVYIEERDTKLLKQGNFKSFVKDRRLNGLFSFVDTGGLAMEQYPISKLRVEYELAKYQTARVCAFEQTLELEESLLTRYPHLPDKNFRKMLESWSDPLLAKWPELHGKVRLLIAVRNAFSHNQYPMYDEAVFSSIRKYDPSSPDAIEERMGLNIAHRLSEEVKQAKETVERIIQA

SEQ ID NO: 163 - protein, 1119 aa, Porphyromonas gulae
MTEQSERPYNGTYYTLEDKHFWAAFLNLARHNAYITLTHIDRQLAYSKADITNDQDVLSFKALWKNLDNDLERKSRLRSLILKHFSFLEGAAYGKKLFESKSSGNKSSKNKELTKKEKEELQANALSLDNLKSILFDFLQKLKDFRNYYSHYRHSGSSELPLFDGNMLQRLYNVFDVSVQRVKRDHEHNDKVDPHRHFNHLVRKGKKDRYGHNDNPSFKHHFVDGEGMVTEAGLLFFVSLFLEKRDAIWMQKKIRGFKGGTETYQQMTNEVFCRSRISLPKLKLESLRTDDWMLLDMLNELVRCPKPLYDRLREKDRARFRVPVDILPDEDDTDGGGEDPFKNTLVRHQDRFPYFALRYFDLKKVFTSLRFHIDLGTYHFAIYKKVIGEQPEDRHLTRNLYGFGRIQDFAEEHRPEEWKRLVRDLDYFETGDKPYISQTTPHYHIEKGKIGLRFVPEGQHLWPSPEVGTTRTGRSKYAQDKRLTAEAFLSVHELMPMMFYYFLLREKYSEEVSAEKVQGRIKRVIEDVYAIYDAFARDEINTRDELDACLADKGIRRGHLPKQMIGILSQEHKNMEEKVRKKLQEMIADTDHRLDMLDRQTDRKIRIGRKNAGLPKSGVIADWLVRDMMRFQPVAKDTSGKPLNNSKANSTEYRMLQRALALFGGEKERLTPYFRQMNLTGGNNPHPFLDETRWESHTNILSFYRSYLRARKAFLERIGRSDRVENRPFLLLKEPKTDRQTLVAGWKSEFHLPRGIFTEAVRDCLIEMGYDEVGSYKEVGFMAKAVPLYFERACKDRVQPFYDSPFNVGNSLKPKKGRFLSKEKRAEEWESGKERFRLAKLKKEILEAQEHPYHDFKSWQKFERELRLVKNQDIITWMMCRDLMEENKVEGLDTGTLYLKDIRPNVQEQGSLNVLNRVKPMRLPVVVYRADSRGHVHKEEAPLATVYIEERDTKLLKQGNFKSFVKDRRLNGLFSFVDTGGLAMEQYPISKLRVEYELAKYQTARVCVFELTLRLEESLLSRYPHLPDESFREMLESWSDPLLAKWPELHGKVRLLIAVRNAFSHNQYPMYDEAVFSSIRKYDPSSPDAIEERMGLNIAHRLSEEVKQAKETVERIIQA

SEQ ID NO: 164 - protein, 1119 aa, Porphyromonas gulae
MTEQSERPYNGTYYTLEDKHFWAAFLNLARHNAYITLTHIDRQLAYSKADITNDQDVLSFKALWKNFDNDLERKSRLRSLILKHFSFLEGAAYGKKLFESKSSGNKSSKNKELTKKEKEELQANALSLDNLKSILFDFLQKLKDFRNYYSHYRHSGSSELPLFDGNMLQRLYNVFDVSVQRVKRDHEHNDKVDPHYHFNHLVRKGKKDRYGHNDNPSFKHHFVDSEGMVTEAGLLFFVSLFLEKRDAIWMQKKIRGFKGGTGPYEQMTNEVFCRSRISLPKLKLESLRTDDWMLLDMLNELVRCPKPLYDRLREKDRACFRVPVDILPDEDDTDGGGEDPFKNTLVRHQDRFPYFALRYFDLKKVFTSLRFHIDLGTYHFAIYKKMIGEQPEDRHLTRNLYGFGRIQDFAEEHRPEEWKRLVRDLDYFETGDKPYISQTTPHYHIEKGKIGLRFMPEGQHLWPSPEVGTTRTGRSKYAQDKRLTAEAFLSVHELMPMMFYYFLLREKYSEEVSAEKVQGRIKRVIKDVYAIYDAFARDEINTLKELDACSADKGIRRGHLPKQMIGILSQEHKNMEEKVRKKLQEMIADTDHRLDMLDRQTDRKIRIGRKNAGLPKSGVIADWLVRDMMRFQPVAKDTSGKPLNNSKANSTEYRMLQRALALFGGEKERLTPYFRQMNLTGGNNPHPFLDETRWESHTNILSFYRSYLRARKAFLERIGRSDRVENRPFLLLKEPKNDRQTLVAGWKSEFHLPRGIFTEAVRDCLIEMGYDEVGSYKEVGFMAKAVPLYFERACKDRVQPFYDSPFNVGNSLKPKKGRFLSKEKRAEEWESGKERFRLAKLKKEILEAKEHPYHDFKSWQKFERELRLVKNQDIITWMMCRDLMEENKVEGLDTGTLYLKDIRTDVHEQGSLNVLNRVKPMRLPVVVYRADSRGHVHKEQAPLATVYIEERDTKLLKQGNFKSFVKDRRLNGLFSFVDTGGLAMEQYPISKLRVEYELAKYQTARVCAFEQTLELEESLLTRYPHLPDENFREMLESWSDPLLGKWPDLHGKVRLLIAVRNAFSHNQYPMYDEAVFSSIRKYDPSSPDAIEERMGLNIAHRLSEEVKQAKETVERIIQA

SEQ ID NO: 165 - protein, 1175 aa, Porphyromonas gulae
MTEQSERPYNGTYYTLEDKHFWAAFLNLARHNAYITLTHIDRQLAYSKADITNDQDVLSFKALWKNFDNDLERKSRLRSLILKHFSFLEGAAYGKKLFESKSSGNKSSKNKELTKKEKEELQANALSLDNLKSILFDFLQKLKDFRNYYSHYRHSESSELPLFDGNMLQRLYNVFDVSVQRVKRDHEHNDKVDPHRHFNHLVRKGKKDRYGHNDNPSFKHHFVDGEGMVTEAGLLFFVSLFLEKRDAIWMQKKIRGFKGGTETYQQMTNEVFCRSRISLPKLKLESLRTDDWMLLDMLNELVRCPKPLYDRLREDDRACFRVPVDILPDEDDTDGGGEDPFKNTLVRHQDRFPYFALRYFDLKKVFTSLRFHIDLGTYHFAIYKKMIGEQPEDRHLTRNLYGFGRIQDFAEEHRPEEWKRLVRDLDYFETGDKPYISQTSPHYHIEKGKIGLRFMPEGQHLWPSPEVGTTRTGRSKYAQDKRLTAEAFLSVHELMPMMFYYFLLREKYSEEVSAEKVQGRIKRVIEDVYAIYDAFARDEINTLKELDACLADKGIRRGHLPKQMIAILSQEHKDMEEKIRKKLQEMIADTDHRLDMLDRQTDRKIRIGRKNAGLPKSGVIADWLVRDMMRFQPVAKDTSGKPLNNSKANSTEYRMLQRALALFGGEKKRLTPYFRQMNLTGGNNPHPFLHETRWESHTNILSFYRSYLRARKAFLERIGRSDRMENRPFLLLKEPKTDRQTLVAGWKSEFHLPRGIFTEAVRDCLIEMGYDEVGSYREVGFMAKAVPLYFERACEDRVQPFYDSPFNVGNSLKPKKGRFLSKEERAEEWERGKERFRDLEAWSHSAARRIEDAFAGIEYASPGNKKKIEQLLRDLSLWEAFESKLKVRADKINLAKLKKEILEAQEHPYHDFKSWQKFERELRLVKNQDIITWMMCRDLMEENKVEGLDTGTLYLKDIRPNVQEQGSLNVLNRVKPMRLPVVVYRADSRGHVHKEEAPLATVYIEERDTKLLKQGNFKSFVKDRRLNGLFSFVDTGGLAMEQYPISKLRVEYELAKYQTARVCVFELTLRLEESLLTRYPHLPDESFRKMLESWSDPLLAKWPELHGKVRLLIAVRNAFSHNQYPMYDEAVFSSIRKYDPSSPDAIEERMGLNIAHRLSEEVKQAKETVERIIQV

SEQ ID NO: 166 - protein, 1119 aa, Porphyromonas gulae
MTEQSERPYNGTYYTLEDKHFWAAFLNLARHNAYITLTHIDRQLAYSKADITNDEDILFFKGQWKNLDNDLERKSRLRSLILKHFSFLEGAAYGKKFFESKSSGNKSSKNKELTKKEKEELQANALSLDNLKSILFDFLQKLKDFRNYYSHYRHSGSSELPLFDGNMLQRLYNVFDVSVQRVKRDHEHNDEVDPHYHFNHLVRKGKKDRYGHNDNPSFKHHFVDGEGMVTEAGLLFFVSLFLEKRDAIWMQKKIRGFKGGTEPYEQMTNEVFCRSRISLPKLKLESLRTDDWMLLDMLNELVRCPKPLYDRLREKDRACFRVPVDILPDEDDTDGGGEDPFKNTLVRHQDRFPYFALRYFDLKKVFTSLRFHIDLGTYHFAIYKKMIGEQPEDRHLTRNLYGFGRIQDFAEEHRPEEWKRLVRDLDYFETGDKPYISQTTPHYHIEKGKIGLRFVPEGQHLWPSPEVGTTRTGRSKYAQDKRLTAEAFLSVHELMPMMFYYFLLREKYSEEVSAEKVQGRIKRVIEDVYAIYDAFARDEINTLKELDACLADKGIRRGHLPKQMIGILSQERKDMEEKVRKKLQEMIADTDHRLDMLDRQTDRKIRIGRKNAGLPKSGVIADWLVRDMMRFQPVAKDTSGKPLNNSKANSTEYRMLQRALALFGGEKERLTPYFRQMNLTGGNNPHPFLHETRWESHTNILSFYRSYLRARKAFLERIGRSDRVENCPFLLLKEPKTDRQTLVAGWKGEFHLPRGIFTEAVRDCLIEMGYDEVGSYREVGFMAKAVPLYFERACEDRVQPFYDSPFNVGNSLKPKKGRFLSKEKRAEEWESGKERFRLAKLKKEILEAQEHPYHDFKSWQKFERELRLVKNQDIITWMMCRDLMEENKVEGLDTGTLYLKDIRPNVQEQGSLNVLNRVKPMRLPVVVYRADSRGHVHKEEAPLATVYIEERDTKLLKQGNFKSFVKDRRLNGLFSFVDTGALAMEQYPISKLRVEYELAKYQTARVCAFEQTLELEESLLTRYPHLPDESFREMLESWSDPLLTKWPELHGKVRLLIAVRNAFSHNQYPMYDEAVFSSIWKYDPSSPDAIEERMGLNIAHRLSEEVKQAKETIERIIQA

SEQ ID NO: 167 - protein, 1174 aa, Porphyromonas gulae
MTEQSERPYNGTYYTLEDKHFWAAFLNLARHNAYITLTHIDRQLAYSKADITNDQDVLSFKALWKNLDNDLERKSRLRSLILKHFSFLEGAAYGKKLFESKSSGNKSSKNKELTKKEKEELQANALSLDNLKSILFDFLQKLKDFRNYYSHYRHSGSSELPLFDGNMLQRLYNVFDVSVQRVKRDHEHNDKVDPHYHFNHLVRKGKKDRYGHNDNPSFKHHFVDSEGMVTEAGLLFFVSLFLEKRDAIWMQKKIRGFKGGTGPYEQMTNEVFCRSRISLPKLKLESLRTDDWMLLDMLNELVRCPKPLYDRLREKDRACFRVPVDILPDEDDTDGGGEDPFKNTLVRHQDRFPYFALRYFDLKKVFTSLRFHIDLGTYHFAIYKKMIGEQPEDRHLTRNLYGFGRIQDFAEEHRPEEWKRLVRDLDYLETGDKPYISQTTPHYHIEKGKIGLRFVPEGQHLWPSPEVGTTRTGRSKCAQDKRLTAEAFLSVHELMPMMFYYFLLREKYSEEVSAEKVQGRIKRVIEDVYAIYDAFARDEINTLKELDTCLADKGIRRGHLPKQMITILSQERKDMKEKIRKKLQEMIADTDHRLDMLDRQTDRKIRIGRKNAGLPKSGVIADWLVRDMMRFQPVAKDASGKPLNNSKANSTEYRMLQRALALFGGEKERLTPYFRQMNLTGGNNPHPFLHETRWESHTNILSFYRSYLRARKAFLERIGRSDRVENCPFLLLKEPKTDRQTLVAGWKDEFHLPRGIFTEAVRDCLIEMGYDEVGSYREVGFMAKAVPLYFERACEDRVQPFYDSPFNVGNSLKPKKGRFLSKEDRAEEWERGMERFRDLEAWSHSAARRIKDAFAGIEYASPGNKKKIEQLLRDLSLWEAFESKLKVRADKINLAKLKKEILEAQEHPYHDFKSWQKFERELRLVKNQDIITWMMCRDLMEENKVEGLDTGTLYLKDIRPNVQEQGSLNVLNRVKPMRLPVVVYRADSRGHVHKEAPLATVYIEERNTKLLKQGNFKSFVKDRRLNGLFSFVDTGGLAMEQYPISKLRVEYELAKYQTARVCVFELTLRLEESLLSRYPHLPDESFREMLESWSDPLLAKWPELHGKVRLLIAVRNAFSHNQYPMYDEAVFSSIRKYDPSSPDAIEERMGLNIAHRLSEEVKQAKETVERIIQA

SEQ ID NO: 168 - protein, 1135 aa, Porphyromonas gulae
MNTVPATENKGQSRTVEDDPQYFGLYLNLARENLIEVESHVRIKFGKKKLNEESLKQSLLCDHLLSIDRWTKVYGHSRRYLPFLHCFDPDSGIEKDHDSKTGVDPDSAQRLIRELYSLLDFLRNDFSHNRLDGTTFEHLKVSPDISSFITGAYTFACERAQSRFADFFKPDDFLLAKNRKEQLISVADGKECLTVSGFAFFICLFLDREQASGMLSRIRGFKRTDENWARAVHETFCDLCIRHPHDRLESSNTKEALLLDMLNELNRCPRILYDMLPEEERAQFLPALDENSMNNLSENSLNEESRLLWDGSSDWAEALTKRIRHQDRFPYLMLRFIEEMDLLKGIRFRVDLGEIELDSYSKKVGRNGEYDRTITDHALAFGKLSDFQNEEEVSRMISGEASYPVRFSLFAPRYAIYDNKIGYCHTSDPVYPKSKTGEKRALSNPQSMGFISVHDLRKLLLMELLCEGSFSRMQSDFLRKANRILDETAEGKLQFSALFPEMRHRFIPPQNPKSKDRREKAETTLEKYKQEIKGRKDKLNSQLLSAFDMNQRQLPSRLLDEWMNIRPASHSVKLRTYVKQLNEDCRLRLRKFRKDGDGKARAIPLVGEMATFLSQDIVRMIISEETKKLITSAYYNEMQRSLAQYAGEENRRQFRAIVAELHLLDPSSGHPFLSATMETAHRYTEDFYKCYLEKKREWLAKTFYRPEQDENTKRRISVFFVPDGEARKLLPLLIRRRMKEQNDLQDWIRNKQAHPIDLPSHLFDSKIMELLKVKDGKKKWNEAFKDWWSTKYPDGMQPFYGLRRELNIHGKSVSYIPSDGKKFADCYTHLMEKTVRDKKRELRTAGKPVPPDLAAYIKRSFHRAVNEREFMLRLVQEDDRLMLMAINKMMTDREEDILPGLKNIDSILDEENQFSLAVHAKVLEKEGEGGDNSLSLVPATIEIKSKRKDWSKYIRYRYDRRVPGLMSHFPEHKATLDEVKTLLGEYDRCRIKIFDWAFALEGAIMSDRDLKPYLHESSSREGKSGEHSTLVKMLVEKKGCLTPDESQYLILIRNKAAHNQFPCAAEMPLIYRDVSAKVGSIEGSSAKDLPEGSSLVDSLWKKYEMIIRKILPILDHENRFFGKLLNNMSQPINDL

SEQ ID NO: 169 - protein, 1218 aa, Capnocytophaga cynodegmi
MENKTSLGNNIYYNPFKPQDKSYFAGYLNAAMENIDSVFRELGKRLKGKEYTSENFFDAIFKENISLVEYERYVKLLSDYFPMARLLDKKEVPIKERKENFKKNFRGIIKAVRDLRNFYTHKEHGEVEITDEIFGVLDEMLKSTVLTVKKKKIKTDKTKEILKKSIEKQLDILCQKKLEYLKDTARKIEEKRRNQRERGEKKLVPRFEYSDRRDDLIAAIYNDAFDVYIDKKKDSLKESSKTKYNTESYPQQEEGDLKIPISKNGVVFLLSLFLSKQEVHAFKSKIAGFKATVIDEATVSHRKNSICFMATHEIFSHLAYKKLKRKVRTAEINYSEAENAEQLSIYAKETLMMQMLDELSKVPDVVYQNLSEDVQKTFIEDWNEYLKENNGDVGTMEEEQVIHPVIRKRYEDKFNYFAIRFLDEFAQFPTLRFQVHLGNYLHDSRPKEHLISDRRIKEKITVFGRLSELEHKKALFIKNTETNEDRKHYWEVFPNPNYDFPKENISVNDKDFPIAGSILDREKQPTAGKIGIKVNLLNQKYISEVDKAVKAHQLKQRNNKPSIQNIIEEIVPINGSNPKEIIVFGGQPTAYLSMNDIHSILYEFFDKWEKKKEKLEKKGEKELRKEIGKELEEKIVGKIQTQIQQIIDKDINAKILKPYQDDDSTAIDKEKLIKDLKQEQKILQKLKNEQTAREKEYQECIAYQEESRKIKRSDKSRQKYLRNQLKRKYPEVPTRKEILYYQEKGKVAVWLANDIKRFMPTDFKNEWKGEQHSLLQKSLAYYEQCKEELKNLLPQQKVFKHLPFELGGHFQQKYLYQFYTRYLDKRLEHISGLVQQAENFKNENKVFKKVENECFKFLKKQNYTHKGLDAQAQSVLGYPIFLERGFMDEKPTIIKGKTFKGNESLFTDWFRYYKEYQNFQTFYDTENYPLVELEKKQADRKRETKIYQQKKNDVFTLLMAKHIFKSVFKQDSIDRFSLEDLYQSREERLENQEKAKQTGERNTNYIWNKTVDLNLCDGKVTVENVKLKNVGNFIKYEYDQRVQTFLKYEENIKWQAFLIKESKEEENYPYIVEREIEQYEKVRREELLKEVHLIEEYILEKVKDKEILKKGDNQNFKYYILNGLLKQLKNEDVESYKVFNLNTKPEDVNINQLKQEATDLEQKAFVLTYIRNKFAHNQLPKKEFWDYCQEKYGKIEKEKTYAEYFAEVFKREKEALMK

SEQ ID NO: 170 - protein, 1090 aa, Prevotella sp.
MNIPALVENQKKYFGTYSVMAMLNAQTVLDHIQKVADIEGEQNENNENLWFHPVMSHLYNAKNGYDKQPEKTMFIIERLQSYFPFLKIMAENQREYSNGKYKQNRVEVNSNDIFEVLKRAFGVLKMYRDLTNHYKTYEEKLIDGCEFLTSTEQPLSGMISKYYTVALRNTKERYGYKTEDLAFIQDNIKKITKDAYGKRKSQVNTGFFLSLQDYNGDTQKKLHLSGVGIALLICLFLDKQYINIFLSRLPIFSSYNAQSEERRIIIRSFGINSIKLPKDRIHSEKSNKSVAMDMLNEVKRCPDELFTTLSAEKQSRFRIISDDHNEVLMKRSTDRFVPLLLQYIDYGKLFDHIRFHVNMGKLRYLLKADKTCIDGQTRVRVIEQPLNGFGRLEEAETMRKQENGTFGNSGIRIRDFENVKRDDANPANYPYIVDTYTHYILENNKVEMFISDKGSSAPLLPLIEDDRYVVKTIPSCRMSTLEIPAMAFHMFLFGSKKTEKLIVDVHNRYKRLFQAMQKEEVTAENIASFGIAESDLPQKILDLISGNAHGKDVDAFIRLTVDDMLTDTERRIKRFKDDRKSIRSADNKMGKRGFKQISTGKLADFLAKDIVLFQPSVNDGENKITGLNYRIMQSAIAVYDSGDDYEAKQQFKLMFEKARLIGKGTTEPHPFLYKVFARSIPANAVDFYERYLIERKFYLTGLCNEIKRGNRVDVPFIRRDQNKWKTPAMKTLGRIYSEDLPVELPRQMFDNEIKSHLKSLPQMEGIDFNNANVTYLIAEYMKRVLNDDFQTFYQWKRNYHYMDMLKGEYDRKGSLQHCFTSVEEREGLWKERASRTERYRKLASNKIRSNRQMRNASSEEIETILDKRLSNCRNEYQKSEKVIRRYRVQDALLFLLAKKTLTELADFDGERFKLKEIMPDAEKGILSEIMPMSFTFEKGGKKYTITSEGMKLKNYGDFFVLASDKRIGNLLELVGSDIVSKEDIMEEFNKYDQCRPEISSIVFNLEKWAFDTYPELSARVDREEKVDFKSILKILLNNKNINKEQSDILRKIRNAFDHNNYPDKGIVEIKALPEIAMSIKKAFGEYAIMK

SEQ ID NO: 171 - protein, 1090 aa, Prevotella sp
MNIPALVENQKKYFGTYSVMAMLNAQTVLDHIQKVADIEGEQNENNENLWFHPVMSHLYNAKNGYDKQPEKTMFIIERLQSYFPFLKIMAENQREYSNGKYKQNRVEVNSNDIFEVLKRAFGVLKMYRDQASHYKTYDEKLIDGCEFLTSTEQPLSGMINNYYTVALRNMNERYGYKTEDLAFIQDKRFKFVKDAYGKKKSQVNTGFFLSLQDYNGDTQKKLHLSGVGIALLICLFLDKQYINIFLSRLPIFSSYNAQSEERRIIIRSFGINSIKQPKDRIHSEKSNKSVAMDMLNEIKRCPNELFETLSAEKQSRFRIISNDHNEVLMKRSSDRFVPLLLQYIDYGKLFDHIRFHVNMGKLRYLLKADKTCIDGQTRVRVIEQPLNGFGRLEEVETMRKQENGTFGNSGIRIRDFENMKRDDANPANYPYIVDTYTHYILENNKVEMFISDEETPAPLLPVIEDDRYVVKTIPSCRMSTLEIPAMAFHMFLFGSKKTEKLIVDVHNRYKRLFKAMQKEEVTAENIASFGIAESDLPQKIIDLISGNAHGKDVDAFIRLTVDDMLADTERRIKRFKDDRKSIRSADNKMGKRGFKQISTGKLADFLAKDIVLFQPSVNDGENKITGLNYRIMQSAIAVYNSGDDYEAKQQFKLMFEKARLIGKGTTEPHPFLYKVFVRSIPANAVDFYERYLIERKFYLIGLSNEIKKGNRVDVPFIRRDQNKWKTPAMKTLGRIYDEDLPVELPRQMFDNEIKSHLKSLPQMEGIDFNNANVTYLIAEYMKRVLNDDFQTFYQWKRNYRYMDMLRGEYDRKGSLQSCFTSVEEREGLWKERASRTERYRKLASNKIRSNRQMRNASSEEIETILDKRLSNSRNEYQKSEKVIRRYRVQDALLFLLAKKTLTELADFDGERFKLKEIMPDAEKGILSEIMPMSFTFEKGGKKYTITSEGMKLKNYGDFFVLASDKRIGNLLELVGSDTVSKEDIMEEFKKYDQCRPEISSIVFNLEKWAFDTYPELSARVDREEKVDFKSILKILLNNKNINKEQSDILRKIRNAFDHNNYPDKGVVEIRALPEIAMSIKKAFGEYAIMK

SEQ ID NO: 172 - protein, 1090 aa, Prevotella sp
MNIPALVENQKKYFGTYSVMAMLNAQTVLDHIQKVADIEGEQNENNENLWFHPVMSHLYNAKNGYDKQPEKTMFIIERLQSYFPFLKIMAENQREYSNGKYKQNRVEVNSNDIFEVLKRAFGVLKMYRDLTNHYKTYEEKLIDGCEFLTSTEQPFSGMISKYYTVALRNTKERYGYKAEDLAFIQDNRYKFTKDAYGKRKSQVNTGSFLSLQDYNGDTTKKLHLSGVGIALLICLFLDKQYINLFLSRLPIFSSYNAQSEERRIIIRSFGINSIKQPKDRIHSEKSNKSVAMDMLNEVKRCPDELFTTLSAEKQSRFRIISDDHNEVLMKRSSDRFVPLLLQYIDYGKLFDHIRFHVNMGKLRYLLKADKTCIDGQTRVRVIEQPLNGFGRLEEVETMRKQENGTFGNSGIRIRDFENMKRDDANPANYPYIVETYTHYILENNKVEMFISDEENPTPLLPVIEDDRYVVKTIPSCRMSTLEIPAMAFHMFLFGSEKTEKLIIDVHDRYKRLFQAMQKEEVTAENIASFGIAESDLPQKIMDLISGNAHGKDVDAFIRLTVDDMLTDTERRIKRFKDDRKSIRSADNKMGKRGFKQISTGKLADFLAKDIVLFQPSVNDGENKITGLNYRIMQSAIAVYDSGDDYEAKQQFKLMFEKARLIGKGTTEPHPFLYKVFVRSIPANAVDFYERYLIERKFYLIGLSNEIKKGNRVDVPFIRRDQNKWKTPAMKTLGRIYSEDLPVELPRQMFDNEIKSHLKSLPQMEGIDFNNANVTYLIAEYMKRVLNDDFQTFYQWKRNYRYMDMLRGEYDRKGSLQHCFTSIEEREGLWKERASRTERYRKLASNKIRSNRQMRNASSEEIETILDKRLSNCRNEYQKSEKIIRRYRVQDALLFLLAKKTLTELADFDGERFKLKEIMPDAEKGILSEIMPMSFTFEKGGKIYTITSGGMKLKNYGDFFVLASDKRIGNLLELVGSNTVSKEDIMEEFKKYDQCRPEISSIVFNLEKWAFDTYPELPARVDRKEKVDFWSILDVLSNNKDINNEQSYILRKIRNAFDHNNYPDKGIVEIKALPEIAMSIKKAFGEYAIMK

SEQ ID NO: 173 - protein, 1131 aa, Phaeodactylibacter xiamenensis
MTNTPKRRTLHRHPSYFGAFLNIARHNAFMIMEHLSTKYDMEDKNTLDEAQLPNAKLFGCLKKRYGKPDVTEGVSRDLRRYFPFLNYPLFLHLEKQQNAEQAATYDINPEDIEFTLKGFFRLLNQMRNNYSHYISNTDYGKFDKLPVQDIYEAAIFRLLDRGKHTKRFDVFESKHTRHLESNNSEYRPRSLANSPDHENTVAFVTCLFLERKYAFPFLSRLDCFRSTNDAAEGDPLIRKASHECYTMFCCRLPQPKLESSDILLDMVNELGRCPSALYNLLSEEDQARFHIKREEITGFEEDPDEELEQEIVLKRHSDRFPYFALRYFDDTEAFQTLRFDVYLGRWRTKPVYKKRIYGQERDRVLTQSIRTFTRLSRLLPIYENVKHDAVRQNEEDGKLVNPDVTSQFHKSWIQIESDDRAFLSDRIEHFSPHYNFGDQVIGLKFINPDRYAAIQNVFPKLPGEEKKDKDAKLVNETADAIISTHEIRSLFLYHYLSKKPISAGDERRFIQVDTETFIKQYIDTIKLFFEDIKSGELQPIADPPNYQKNEPLPYVRGDKEKTQEERAQYRERQKEIKERRKELNTLLQNRYGLSIQYIPSRLREYLLGYKKVPYEKLALQKLRAQRKEVKKRIKDIEKMRTPRVGEQATWLAEDIVFLTPPKMHTPERKTTKHPQKLNNDQFRIMQSSLAYFSVNKKAIKKFFQKETGIGLSNRETSHPFLYRIDVGRCRGILDFYTGYLKYKMDWLDDAIKKVDNRKHGKKEAKKYEKYLPSSIQHKTPLELDYTRLPVYLPRGLFKKAIVKALAAHADFQVEPEEDNVIFCLDQLLDGDTQDFYNWQRYYRSALTEKETDNQLVLAHPYAEQILGTIKTLEGKQKNNKLGNKAKQKIKDELIDLKRAKRRLLDREQYLRAVQAEDRALWLMIQERQKQKAEHEEIAFDQLDLKNITKILTESIDARLRIPDTKVDITDKLPLRRYGDLRRVAKDRRLVNLASYYHVAGLSEIPYDLVKKELEEYDRRRVAFFEHVYQFEKEVYDRYAAELRNENPKGESTYFSHWEYVAVAVKHSADTHFNELFKEKVMQLRNKFHHNEFPYFDWLLPEVEKASAALYADRVFDVAEGYYQKMRKLMRQ

SEQ ID NO: 174 - protein, 1155 aa, Flavobacterium sp.
MDNNITVEKTELGLGITYNHDKVEDKHYFGGFFNLAQNNIDLVAQEFKKRLLIQGKDSINIFANYFSDQCSITNLERGIKILAEYFPVVSYIDLDEKNKSKSIREHLILLLETINNLRNYYTHYYHKKIIIDGSLFPLLDTILLKVVLEIKKKKLKEDKTKQLLKKGLEKEMTILFNLMKAEQKEKKIKGWNIDENIKGAVLNRAFSHLLYNDELSDYRKSKYNTEDETLKDTLTESGILFLLSFFLNKKEQEQLKANIKGYKGKIASIPDEEITLKNNSLRNMATHWTYSHLTYKGLKHRIKTDHEKETLLVNMVDYLSKVPHEIYQNLSEQNKSLFLEDINEYMRDNEENHDSSEASRVIHPVIRKRYENKFAYFAIRFLDEFAEFPTLRFMVNVGNYIHDNRKKDIGGTSLITNRTIKQQINVFGNLTEIHKKKNDYFEKEENKEKTLEWELFPNPSYHFQKENIPIFIDLEKSKETNDLAKEYAKEKKKIFGSSRKKQQNTAKKNRETIINLVFDKYKTSDRKTVTFEQPTALLSFNELNSFLYAFLVENKTGKELEKIIIEKIANQYQILKNCSSTVDKTNDNIPKSIKKIVNTTTDSFYFEGKKIDIEKLEKDITIEIEKTNEKLETIKENEESAQNYKRNERNTQKRKLYRKYVFFTNEIGIEATWITNDILRFLDNKENWKGYQHSELQKFISQYDNYKKEALGLLESEWNLESDAFFGQNLKRMFQSNSTFETFYKKYLDNRKNTLETYLSAIENLKTMTDVRPKVLKKKWTELFRFFDKKIYLLSTIETKINELITKPINLSRGIFEEKPTFINGKNPNKENNQHLFANWFIYAKKQTILQDFYNLPLEQPKAITNLKKHKYKLERSINNLKIEDIYIKQMVDFLYQKLFEQSFIGSLQDLYTSKEKREIEKGKAKNEQTPDESFIWKKQVEINTHNGRIIAKTKIKDIGKFKNLLTDNKIAHLISYDDRIWDFSLNNDGDITKKLYSINTELESYETIRREKLLKQIQQFEQFLLEQETEYSAERKHPEKFEKDCNPNFKKYIIEGVLNKIIPNHEIEEIEILKSKEDVFKINFSDILILNNDNIKKGYLLIMIRNKFAHNQLIDKNLFNFSLQLYSKNENENFSEYLNKVCQNIIQEFKEKLK

SEQ ID NO: 175 - protein, 1175 aa, Porphyromonas gulae
MTEQSERPYNGTYYTLEDKHFWAAFLNLARHNAYITLTHIDRQLAYSKADITNDQDVLSFKALWKNFDNDLERKSRLRSLILKHFSFLEGAAYGKKLFESKSSGNKSSKNKELTKKEKEELQANALSLDNLKSILFDFLQKLKDFRNYYSHYRHSESSELPLFDGNMLQRLYNVFDVSVQRVKRDHEHNDKVDPHRHFNHLVRKGKKDRYGHNDNPSFKHHFVDSEGMVTEAGLLFFVSLFLEKRDAIWMQKKIRGFKGGTETYQQMTNEVFCRSRISLPKLKLESLRTDDWMLLDMLNELVRCPKPLYDRLREKDRARFRVPVDILPDEDDTDGGGEDPFKNTLVRHQDRFPYFALRYFDLKKVFTSLRFHIDLGTYHFAIYKKMIGEQPEDRHLTRNLYGFGRIQDFAEEHRPEEWKRLVRDLDYFETGDKPYISQTTPHYHIEKGKIGLRFMPEGQHLWPSPEVGTTRTGRSKYAQDKRLTAEAFLSVHELMPMMFYYFLLREKYSEEVSAEKVQGRIKRVIEDVYAIYDAFARDEINTLKELDACLADKGIRRGHLPKQMIAILSQEHKDMEEKIRKKLQEMIADTDHRLDMLDRQTDRKIRIGRKNAGLPKSGVIADWLVRDMMRFQPVAKDTSGKPLNNSKANSTEYRMLQRALALFGGEKKRLTPYFRQMNLTGGNNPHPFLHETRWESHTNILSFYRSYLRARKAFLERIGRSDRMENRPFLLLKEPKTDRQTLVAGWKSEFHLPRGIFTEAVRDCLIEMGYDEVGSYREVGFMAKAVPLYFERACEDRVQPFYDSPFNVGNSLKPKKGRFLSKEERAEEWERGKERFRDLEAWSHSAARRIEDAFAGIEYASPGNKKKIEQLLRDLSLWEAFESKLKVRADKINLAKLKKEILEAQEHPYHDFKSWQKFERELRLVKNQDIITWMMCRDLMEENKVEGLDTGTLYLKDIRPNVQEQGSLNVLNRVKPMRLPVVVYRADSRGHVHKEEAPLATVYIEERDTKLLKQGNFKSFVKDRRLNGLFSFVDTGGLAMEQYPISKLRVEYELAKYQTARVCVFELTLRLEESLLTRYPHLPDESFRKMLESWSDPLLAKWPELHGKVRLLIAVRNAFSHNQYPMYDEAVFSSIRKYDPSSPDAIEERMGLNIAHRLSEEVKQAKETVERIIQV

SEQ ID NO: 176 - protein, 1145 aa, Chryseobacterium sp.
METQTIGHGIAYDHSKIQDKHFFGGFLNLAENNIKAVLKAFSEKFNVGNVDVKQFADVSLKDNLPDNDFQKRVSFLKMYFPVVDFINIPNNRAKFRSDLTTLFKSVDQLRNFYTHYYHKPLDFDASLFILLDDIFARTAKEVRDQKMKDDKTRQLLSKSLSEELQKGYELQLERLKELNRLGKKVNIHDQLGIKNGVLNNAFNHLIYKDGESFKTKLTYSSALTSFESAENGIEISQSGLLFLLSMFLKRKEIEDLKNRNKGFKAKVVIDEDGKVNGLKFMATHWVFSYLCFKGLKSKLSTEFHEETLLIQIIDELSKVPDELYCAFDKETRDKFIEDINEYVKEGHQDFSLEDAKVIHPVIRKRYENKFNYFAIRFLDEFVKFPSLRFQVHVGNYVHDRRIKNIDGTTFETERVVKDRIKVFGRLSEISSYKAQYLSSVSDKHDETGWEIFPNPSYVFINNNIPIHISVDTSFKKEIADFKKLRRAQVPDELKIRGAEKKRKFEITQMIGSKSVLNQEEPIALLSLNEIPALLYEILINGKEPAEIERIIKDKLNERQDVIKNYNPENWLPASQISRRLRSNKGERIINTDKLLQLVTKELLVTEQKLKIISDNREALKQKKEGKYIRKFIFTNSELGREAIWLADDIKRFMPADVRKEWKGYQHSQLQQSLAFYNSRPKEALAILESSWNLKDEKIIWNEWILKSFTQNKFFDAFYNEYLKGRKKYFAFLSEHIVQYTSNAKNLQKFIKQQMPKDLFEKRHYIIEDLQTEKNKILSKPFIFPRGIFDKKPTFIKGVKVEDSPESFANWYQYGYQKDHQFQKFYDWKRDYSDVFLEHLGKPFINNGDRRTLGMEELKERIIIKQDLKIKKIKIQDLFLRLIAENLFQKVFKYSAKLPLSDFYLTQEERMEKENMAALQNVREEGDKSPNIIKDNFIWSKMIPYKKGQIIENAVKLKDIGKLNVLSLDDKVQTLLSYDDAKPWSKIALENEFSIGENSYEVIRREKLFKEIQQFESEILFRSGWDGINHPAQLEDNRNPKFKMYIVNGILRKSAGLYSQGEDIWFEYNADFNNLDADVLETKSELVQLAFLVTAIRNKFAHNQLPAKEFYFYIRAKYGFADEPSVALVYLNFTKYAINEFKKVMI

SEQ ID NO: 177 - protein, 948 aa, Riemerella anatipestifer
MFFSFHNAQRVIFKHLYKAFDASLRMVKEDYKAHFTVNLTRDFAHLNRKGKNKQDNPDFNRYRFEKDGFFTESGLLFFTNLFLDKRDAYWMLKKVSGFKASHKQREKMTTEVFCRSRILLPKLRLESRYDHNQMLLDMLSELSRCPKLLYEKLSEENKKHFQVEADGFLDEIEEEQNPFKDTLIRHQDRFPYFALRYLDLNESFKSIRFQVDLGTYHYCIYDKKIGDEQEKRHLTRTLLSFGRLQDFTEINRPQEWKALTKDLDYKETSNQPFISKTTPHYHITDNKIGFRLGTSKELYPSLEIKDGANRIAKYPYNSGFVAHAFISVHELLPLMFYQHLTGKSEDLLKETVRHIQRIYKDFEEERINTIEDLEKANQGRLPLGAFPKQMLGLLQNKQPDLSEKAKIKIEKLIAETKLLSHRLNTKLKSSPKLGKRREKLIKTGVLADWLVKDFMRFQPVAYDAQNQPIKSSKANSTEFWFIRRALALYGGEKNRLEGYFKQTNLIGNTNPHPFLNKFNWKACRNLVDFYQQYLEQREKFLEAIKNQPWEPYQYCLLLKIPKENRKNLVKGWEQGGISLPRGLFTEAIRETLSEDLMLSKPIRKEIKKHGRVGFISRAITLYFKEKYQDKHQSFYNLSYKLEAKAPLLKREEHYEYWQQNKPQSPTESQRLELHTSDRWKDYLLYKRWQHLEKKLRLYRNQDVMLWLMTLELTKNHFKELNLNYHQLKLENLAVNVQEADAKLNPLNQTLPMVLPVKVYPATAFGEVQYHKTPIRTVYIREEHTKALKMGNFKALVKDRRLNGLFSFIKEENDTQKHPISQLRLRRELEIYQSLRVDAFKETLSLEEKLLNKHTSLSSLENEFRALLEEWKKEYAASSMVTDEHIAFIASVRNAFCHNQYPFYKEALHAPIPLFTVAQPTTEEKDGLGIAEALLKVLREYCEIVKSQI

SEQ ID NO: 178 - protein, 1175 aa, Porphyromonas gingivalis
MTEQNEKPYNGTYYTLEDKHFWAAFFNLARHNAYITLAHIDRQLAYSKADITNDEDILFFKGQWKNLDNDLERKARLRSLILKHFSFLEGAAYGKKLFESQSSGNKSSKKKELTKKEKEELQANALSLDNLKSILFDFLQKLKDFRNYYSHYRHPESSELPLFDGNMLQRLYNVFDVSVQRVKRDHEHNDKVDPHRHFNHLVRKGKKDKYGNNDNPFFKHHFVDREEKVTEAGLLFFVSLFLEKRDAIWMQKKIRGFKGGTEAYQQMTNEVFCRSRISLPKLKLESLRTDDWMLLDMLNELVRCPKLLYDRLREEDRARFRVPVDILSDEDDTDGTEEDPFKNTLVRHQDRFPYFALRYFDLKKVFTSLRFHIDLGTYHFAIYKKNIGEQPEDRHLTRNLYGFGRIQDFAEEHRPEEWKRLVRDLDYFETGDKPYITQTTPHYHIEKGKIGLRFVPEGQLLWPSPEVGATRTGRSKYAQDKRFTAEAFLSVHELMPMMFYYFLLREKYSEEASAEKVQGRIKRVIEDVYAVYDAFARDEINTRDELDACLADKGIRRGHLPRQMIAILSQEHKDMEEKVRKKLQEMIADTDHRLDMLDRQTDRKIRIGRKNAGLPKSGVIADWLVRDMMRFQPVAKDTSGKPLNNSKANSTEYRMLQRALALFGGEKERLTPYFRQMNLTGGNNPHPFLHETRWESHTNILSFYRSYLKARKAFLQSIGRSDREENHRFLLLKEPKTDRQTLVAGWKSEFHLPRGIFTEAVRDCLIEMGYDEVGSYKEVGFMAKAVPLYFERACKDRVQPFYDYPFNVGNSLKPKKGRFLSKEKRAEEWESGKERFRDLEAWSHSAARRIEDAFVGIEYASWENKKKIEQLLQDLSLWETFESKLKVKADKINIAKLKKEILEAKEHPYHDFKSWQKFERELRLVKNQDIITWMMCRDLMEENKVEGLDTGTLYLKDIRTDVQEQGSLNVLNHVKPMRLPVVVYRADSRGHVHKEEAPLATVYIEERDTKLLKQGNFKSFVKDRRLNGLFSFVDTGALAMEQYPISKLRVEYELAKYQTARVCAFEQTLELEESLLTRYPHLPDESFREMLESWSDPLLDKWPDLQREVRLLIAVRNAFSHNQYPMYDETIFSSIRKYDPSSLDAIEERMGLNIAHRLSEEVKLAKEMVERIIQA

SEQ ID NO: 179 - protein, 1175 aa, Porphyromonas gingivalis
MTEQNEKPYNGTYYTLKDKHFWAAFFNLARHNAYITLTHIDRQLAYSKADITNDEDILFFKGQWKNLDNDLERKARLRSLILKHFSFLEGAAYGKKLFESQSSGNKSSKKKELTKKEKEELQANALSLDNLKSILFDFLQKLKDFRNYYSHYRHPESSELPMFDGNMLQRLYNVFDVSVQRVKRDHEHNDKVDPHRHFNHLVRKGKKDRCGNNDNPFFKHHFVDREGKVTEAGLLFFVSLFLEKRDAIWMQKKIRGFKGGTETYQQMTNEVFCRSRISLPKLKLESLRTDDWMLLDMLNELVRCPKSLYDRLREEDRACFRVPVDILSDEDDTDGAEEDPFKNTLVRHQDRFPYFALRYFDLKKVFTSLRFHIDLGTYHFAIYKKNIGEQPEDRHLTRNLYGFGRIQDFAEEHRPEEWKRLVRDLDCFETGDKPYITQTTPHYHIEKGKIGLRFVPEGQHLWPSPEVGATRTGRSKYAQDKRFTAEAFLSVHELMPMMFYYFLLREKYSEEVSAERVQGRIKRVIEDVYAVYDAFARDEINTRDELDACLADKGIRRGHLPRQMIAILSQKHKDMEEKVRKKLQEMIADTDHRLDMLDRQTDRKIRIGRKNAGLPKSGVIADWLVRDMMRFQPVAKDTSGKPLNNSKANSTEYRMLQRALALFGGEKERLTPYFRQMNLTGGNNPHPFLHETRWESHTNILSFYRSYLKARKAFLQSIGRSDRVENHRFLLLKEPKTDRQTLVAGWKGEFHLPRGIFTEAVRDCLIEMGLDEVGSYKEVGFMAKAVPLYFERACKDRVQPFYDYPFNVGNSLKPKKGRFLSKEKRAEEWESGKERFRDLEAWSHSAARRIEDAFAGIENASRENKKKIEQLLQDLSLWETFESKLKVKADKINIAKLKKEILEAKEHPYLDFKSWQKFERELRLVKNQDIITWMMCRDLMEENKVEGLDTGTLYLKDIRTDVQEQGSLNVLNHVKPMRLPVVVYRADSRGHVHKEQAPLATVYIEERDTKLLKQGNFKSFVKDRRLNGLFSFVDTGALAMEQYPISKLRVEYELAKYQTARVCAFEQTLELEESLLTRYPHLPDENFRKMLESWSDPLLDKWPDLHRKVRLLIAVRNAFSHNQYPMYDEAVFSSIRKYDPSSPDAIEERMGLNIAHRLSEEVKQAKEMAERIIQA

SEQ ID NO: 180 - protein, 1213 aa, Flavobacterium columnare
MSSKNESYNKQKTFNHYKQEDKYFFGGFLNNADDNLRQVGKEFKTRINFNHNNNELASVFKDYFNKEKSVAKREHALNLLSNYFPVLERIQKHTNHNFEQTREIFELLLDTIKKLRDYYTHHYHKPITINPKVYDFLDDTLLDVLITIKKKKVKNDTSRELLKEKFRPELTQLKNQKREELIKKGKKLLEENLENAVFNHCLRPFLEENKTDDKQNKTVSLRKYRKSKPNEETSITLTQSGLVFLISFFLHRKEFQVFTSGLEGFKAKVNTIKEEEISLNKNNIVYMITHWSYSYYNFKGLKHRIKTDQGVSTLEQNNTTHSLTNTNTKEALLTQIVDYLSKVPNEIYETLSEKQQKEFEEDINEYMRENPENEDSTFSSIVSHKVIRKRYENKFNYFAMRFLDEYAELPTLRFMVNFGDYIKDRQKKILESIQFDSERIIKKEIHLFEKLGLVTEYKKNVYLKETSNIDLSRFPLFPSPSYVMANNNIPFYIDSRSNNLDEYLNQKKKAQSQNRKRNLTFEKYNKEQSKDAIIAMLQKEIGVKDLQQRSTIGLLSCNELPSMLYEVIVKDIKGAELENKIAQKIREQYQSIRDFTLDSPQKDNIPTTLTKTISTDTSVTFENQPIDIPRLKNALQKELTLTQEKLLNVKQHEIEVDNYNRNKNTYKFKNQPKDKVDDNKLQRKYVFYRNEIGQEANWLASDLIHFMKNKSLWKGYMHNELQSFLAFFEDKKNDCIALLETVFNLKEDCILTKDLKNLFLKHGNFIDFYKEYLKLKEDFLNTESTFLENGFIGLPPKILKKELSKRLNYIFIVFQKRQFIIKELEEKKNNLYADAINLSRGIFDEKPTMIPFKKPNPDEFASWFVASYQYNNYQSFYELTPDKIENDKKKKYKNLRAINKVKIQDYYLKLMVDTLYQDLFNQPLDKSLSDFYVSKTDREKIKADAKAYQKRNDSFLWNKVIHLSLQNNRITANPKLKDIGKYKRALQDEKIATLLTYDDRTWTYALQKPEKENENDYKELHYTALNMELQEYEKVRSKKLLKQVQELEKQILDKFYDFSNNATHPEDLEIEDKKGKRHPNFKLYITKALLKNESEIINLENIDIEILIKYYDYNTEKLKEKIKNMDEDEKAKIVNTKENYNKITNVLIKKALVLIIIRNKMAHNQYPPKFIYDLATRFVPKKEEEYFACYFNRVFETITTELWENKKKAKEIV

SEQ ID NO: 181 - protein, 1119 aa, Porphyromonas gingivalis
MTEQNERPYNGTYYTLEDKHFWAAFFNLARHNAYITLTHIDRQLAYSKADITNDEDILFFKGQWKNLDNDLERKARLRSLILKHFSFLEGAAYGKKLFENKSSGNKSSKKKELTKKEKEELQANALSLDNLKSILFDFLQKLKDFRNYYSHYRHPESSELPLFDGNMLQRLYNVFDVSVQRVKRDHEHNDKVDPHRHFNHLVRKGKKDRCGNNDNPFFKHHFVDREGKVTEAGLLFFVSLFLEKRDAIWMQKKIRGFKGGTEAYQQMTNEVFCRSRISLPKLKLESLRTDDWMLLDMLNELVRCPKSLYDRLREEDRARFRVPVDILSDEDDTDGTEEDPFKNTLVRHQDRFPYFALRYFDLKKVFTSLRFHIDLGTYHFAIYKKNIGEQPEDRHLTRNLYGFGRIQDFAEEHRPEEWKRLVRDLDYFETGDKPYITQTTPHYHIEKGKIGLRFVPEGQHLWPSPEVGATRTGRSKYAQDKRLTAEAFLSVHELMPMMFYYFLLREKYSEEVSAEKVQGRIKRVIEDVYAVYDAFARGEIDTLDRLDACLADKGIRRGHLPRQMIAILSQEHKDMEEKVRKKLQEMIADTDHRLDMLDRQTDRKIRIGRKNAGLPKSGVIADWLVRDMMRFQPVAKDTSGKPLNNSKANSTEYRMLQRALALFGGEKERLTPYFRQMNLTGGNNPHPFLHETRWESHTNILSFYRSYLKARKAFLQSIGRSDREENHRFLLLKEPKTDRQTLVAGWKSEFHLPRGIFTEAVRDCLIEMGYDEVGSYKEVGFMAKAVPLYFERACKDRVQPFYDYPFNVGNSLKPKKGRFLSKEKRAEEWESGKERFRLAKLKKEILEAKEHPYLDFKSWQKFERELRLVKNQDIITWMMCRDLMEENKVEGLDTGTLYLKDIRTEVQEQGSLNVLNRVKPMRLPVVVYRADSRGHVHKEQAPLATVYIEERDTKLLKQGNFKSFVKDRRLNGLFSFVDTGGLAMEQYPISKLRVEYELAKYQTARVCAFEQTLELEESLLTRCPHLPDKNFRKMLESWSDPLLDKWPDLQREVWLLIAVRNAFSHNQYPMYDEAVFSSIRKYDPSSPDAIEERMGLNIAHRLSEEVKQAKEMAERIIQA

SEQ ID NO: 182 - protein, 1135 aa, Porphyromonas gingivalis
MNTVPASENKGQSRTVEDDPQYFGLYLNLARENLIEVESHVRIKFGKKKLNEESLKQSLLCDHLLSVDRWTKVYGHSRRYLPFLHYFDPDSQIEKDHDSKTGVDPDSAQRLIRELYSLLDFLRNDFSHNRLDGTTFEHLEVSPDISSFITGTYSLACGRAQSRFADFFKPDDFVLAKNRKEQLISVADGKECLTVSGLAFFICLFLDREQASGMLSRIRGFKRTDENWARAVHETFCDLCIRHPHDRLESSNTKEALLLDMLNELNRCPRILYDMLPEEERAQFLPALDENSMNNLSENSLNEESRLLWDGSSDWAEALTKRIRHQDRFPYLMLRFIEEMDLLKGIRFRVDLGEIELDSYSKKVGRNGEYDRTITDHALAFGKLSDFQNEEEVSRMISGEASYPVRFSLFAPRYAIYDNKIGYCHTSDPVYPKSKTGEKRALSNPQSMGFISVHDLRKLLLMELLCEGSFSRMQSGFLRKANRILDETAEGKLQFSALFPEMRHRFIPPQNPKSKDRREKAETTLEKYKQEIKGRKDKLNSQLLSAFDMNQRQLPSRLLDEWMNIRPASHSVKLRTYVKQLNEDCRLRLRKFRKDGDGKARAIPLVGEMATFLSQDIVRMIISEETKKLITSAYYNEMQRSLAQYAGEENRRQFRAIVAELHLLDPSSGHPFLSATMETAHRYTEDFYKCYLEKKREWLAKTFYRPEQDENTKRRISVFFVPDGEARKLLPLLIRRRMKEQNDLQDWIRNKQAHPIDLPSHLFDSKIMELLKVKDGKKKWNEAFKDWWSTKYPDGMQPFYGLRRELNIHGKSVSYIPSDGKKFADCYTHLMEKTVQDKKRELRTAGKPVPPDLAADIKRSFHRAVNEREFMLRLVQEDDRLMLMAINKMMTDREEDILPGLKNIDSILDKENQFSLAVHAKVLEKEGEGGDNSLSLVPATIEIKSKRKDWSKYIRYRYDRRVPGLMSHFPEHKATLDEVKTLLGEYDRCRIKIFDWAFALEGAIMSDRDLKPYLHESSSREGKSGEHSTLVKMLVEKKGCLTPDESQYLILIRNKAAHNQFPCAAEMPLIYRDVSAKVGSIEGSSAKDLPEGSSLVDSLWKKYEMIIRKILPILDPENRFFGKLLNNMSQPINDL

SEQ ID NO: 183 - protein, 950 aa, Riemerella anatipestifer
MFFSFHNAQRVIFKHLYKAFDASLRMVKEDYKAHFTVNLTRDFAHLNRKGKNKQDNPDFNRYRFEKDGFFTESGLLFFTNLFLDKRDAYWMLKKVSGFKASHKQSEKMTTEVFCRSRILLPKLRLESRYDHNQMLLDMLSELSRCPKLLYEKLSEKDKKCFQVEADGFLDEIEEEQNPFKDTLIRHQDRFPYFALRYLDLNESFKSIRFQVDLGTYHYCIYDKKIGYEQEKRHLTRTLLNFGRLQDFTEINRPQEWKALTKDLDYNETSNQPFISKTTPHYHITDNKIGFRLRTSKELYPSLEVKDGANRIAKYPYNSDFVAHAFISISVHELLPLMFYQHLTGKSEDLLKETVRHIQRIYKDFEEERINTIEDLEKANQGRLPLGAFPKQMLGLLQNKQPDLSEKAKIKIEKLIAETKLLSHRLNTKLKSSPKLGKRREKLIKTGVLADWLVKDFMRFQPVVYDAQNQPIKSSKANSTESRLIRRALALYGGEKNRLEGYFKQTNLIGNTNPHPFLNKFNWKACRNLVDFYQQYLEQREKFLEAIKHQPWEPYQYCLLLKVPKENRKNLVKGWEQGGISLPRGLFTEAIRETLSKDLTLSKPIRKEIKKHGRVGFISRAITLYFKEKYQDKHQSFYNLSYKLEAKAPLLKKEEHYEYWQQNKPQSPTESQRLELHTSDRWKDYLLYKRWQHLEKKLRLYRNQDIMLWLMTLELTKNHFKELNLNYHQLKLENLAVNVQEADAKLNPLNQTLPMVLPVKVYPTTAFGEVQYHETPIRTVYIREEQTKALKMGNFKALVKDRHLNGLFSFIKEENDTQKHPISQLRLRRELEIYQSLRVDAFKETLSLEEKLLNKHASLSSLENEFRTLLEEWKKKYAASSMVTDKHIAFIASVRNAFCHNQYPFYKETLHAPILLFTVAQPTTEEKDGLGIAEALLRVLREYCEIVKSQI

SEQ ID NO: 184 - protein, 1213 aa, Flavobacterium columnare
MSSKNESYNKQKTFNHYKQEDKYFFGGFLNNADDNLRQVGKEFKTRINFNHNNNELASVFKDYFNKEKSVAKREHALNLLSNYFPVLERIQKHTNHNFEQTREIFELLLDTIKKLRDYYTHHYHKPITINPKIYDFLDDTLLDVLITIKKKKVKNDTSRELLKEKLRPELTQLKNQKREELIKKGKKLLEENLENAVFNHCLRPFLEENKTDDKQNKTVSLRKYRKSKPNEETSITLTQSGLVFLMSFFLHRKEFQVFTSGLEGFKAKVNTIKEEKISLNKNNIVYMITHWSYSYYNFKGLKHRIKTDQGVSTLEQNNTTHSLTNTNTKEALLTQIVDYLSKVPNEIYETLSEKQQKEFEEDINEYMRENPENEDSTFSSIVSHKVIRKRYENKFNYFAMRFLDEYAELPTLRFMVNFGDYIKDRQKKILESIQFDSERIIKKEIHLFEKLGLVTEYKKNVYLKETSNIDLSRFPLFPSPSYVMANNNIPFYIDSRSNNLDEYLNQKKKAQSQNRKRNLTFEKYNKEQSKDAIIAMLQKEIGVKDLQQRSTIGLLSCNELPSMLYEVIVKDIKGAELENKIAQKIREQYQSIRDFTLNSPQKDNIPTTLIKTISTDTSVTFENQPIDIPRLKNAIQKELALTQEKLLNVKQHEIEVNNYNRNKNTYKFKNQPKDKVDDNKLQRKYVFYRNEIGQEANWLASDLIHFMKNKSLWKGYMHNELQSFLAFFEDKKNDCIALLETVFNLKEDCILTKDLKNLFLKHGNFIDFYKEYLKLKEDFLNTESTFLENGFIGLPPKILKKELSKRLNYIFIVFQKRQFIIKELEEKKNNLYADAINLSRGIFDEKPTMIPFKKPNPDEFASWFVASYQYNNYQSFYELTPDKIENDKKKKYKNLRAINKVKIQDYYLKLMVDTLYQDLFNQPLDKSLSDFYVSKTDREKIKADAKAYQKRNDSFLWNKVIHLSLQNNRITANPKLKDIGKYKRALQDEKIATLLTYDDRTWTYALQKPEKENENDYKELHYTALNMELQEYEKVRSKKLLKQVQELEKQILDKFYDFSNNATHPEDLEIEDKKGKRHPNFKLYITKALLKNESEIINLENIDIEILIKYYDYNTEKLKEKIKNMDEDEKAKIVNTKENYNKITNVLIKKALVLIIIRNKMAHNQYPPKFIYDLATRFVPKKEEEYFACYFNRVFETITTELWENKKKAKEIV

SEQ ID NO: 185 - protein, 1095 aa, Riemerella anatipestifer
MEKPLPPNVYTLKHKFFWGAFLNIARHNAFITICHINEQLGLTTPPNDDKIADVVCGTWNNILNNDHDLLKKSQLTELILKHFPFLAAMCYHPPKKEGKKKGSQKEQQKEKENEAQSQAEALNPSELIKVLKTLVKQLRTLRNYYSHHSHKKPDAEKDIFKHLYKAFDASLRMVKEDYKAHFTVNLTQDFAHLNRKGKNKQDNPDFDRYRFEKDGFFTESGLLFFTNLFLDKRDAYWMLKKVSGFKASHKQSEKMTTEVFCRSRILLPKLRLESRYDHNQMLLDMLSELSRYPKLLYEKLSEEDKKRFQVEADGFLDEIEEEQNPFKDTLIRHQDRFPYFALRYLDLNESFKSIRFQVDLGTYHYCIYDKKIGDEQEKRHLTRTLLSFGRLQDFTEINRPQEWKALTKDLDYKETSKQPFISKTTPHYHITDNKIGFRLGTSKELYPSLEVKDGANRIAQYPYNSDFVAHAFISVHELLPLMFYQHLTGKSEDLLKETVRHIQRIYKDFEEERINTIEDLEKANQGRLPLGAFPKQMLGLLQNKQPDLSEKAKIKIEKLIAETKLLSHRLNTKLKSSPKLGKRREKLIKTGVLADWLVKDFMRFQPVAYDAQNQPIESSKANSTEFQLIQRALALYGGEKNRLEGYFKQTNLIGNTNPHPFLNKFNWKACRNLVDFYQQYLEQREKFLEAIKNQPWEPYQYCLLLKIPKENRKNLVKGWEQGGISLPRGLFTEAIRETLSKDLTLSKPIRKEIKKHGRVGFISRAITLYFREKYQDDHQSFYDLPYKLEAKASPLPKKEHYEYWQQNKPQSPTELQRLELHTSDRWKDYLLYKRWQHLEKKLRLYRNQDVMLWLMTLELTKNHFKELNLNYHQLKLENLAVNVQEADAKLNPLNQTLPMVLPVKVYPATAFGEVQYQETPIRTVYIREEQTKALKMGNFKALVKDRRLNGLFSFIKEENDTQKHPISQLRLRRELEIYQSLRVDAFKETLNLEEKLLKKHTSLSSVENKFRILLEEWKKEYAASSMVTDEHIAFIASVRNAFCHNQYPFYEEALHAPIPLFTVAQQTTEEKDGLGIAEALLRVLREYCEIVKSQI

SEQ ID NO: 186 - protein, 1149 aa, Sinomicrobium oceani
MESTTTLGLHLKYQHDLFEDKHYFGGGVNLAVQNIESIFQAFAERYGIQNPLRKNGVPAINNIFHDNISISNYKEYLKFLKQYLPVVGFLEKSNEINIFEFREDFEILINAIYKLRHFYTHYYHSPIKLEDRFYTCLNELFVAVAIQVKKHKMKSDKTRQLLNKNLHQLLQQLIEQKREKLKDKKAEGEKVSLDTKSIENAVLNDAFVHLLDKDENIRLNYSSRLSEDIITKNGITLSISGLLFLLSLFLQRKEAEDLRSRIEGFKGKGNELRFMATHWVFSYLNVKRIKHRLNTDFQKETLLIQIADELSKVPDEVYKTLDHENRSKFLEDINEYIREGNEDASLNESTVVHGVIRKRYENKFHYLVLRYLDEFVDFPSLRFQVHLGNYIHDRRDKVIDGTNFITNRVIKEPIKVFGKLSHVSKLKSDYMESLSREHKNGWDVFPNPSYNFVGHNIPIFINLRSASSKGKELYRDLMKIKSEKKKKSREEGIPMERRDGKPTKIEISNQIDRNIKDNNFKDIYPGEPLAMLSLNELPALLFELLRRPSITPQDIEDRMVEKLYERFQIIRDYKPGDGLSTSKISKKLRKADNSTRLDGKKLLRAIQTETRNAREKLHTLEENKALQKNRKRRTVYTTREQGREASWLAQDLKRFMPIASRKEWRGYHHSQLQQILAFYDQNPKQPLELLEQFWDLKEDTYVWNSWIHKSLSQHNGFVPMYEGYLKGRLGYYKKLESDIIGFLEEHKVLKRYYTQQHLNVIFRERLYFIKTETKQKLELLARPLVFPRGIFDDKPTFVQDKKVVDHPELFADWYVYSYKDDHSFQEFYHYKRDYNEIFETELSWDIDFKDNKRQLNPSEQMDLFRMKWDLKIKKIKIQDIFLKIVAEDIYLKIFGHKIPLSLSDFYISRQERLTLDEQAVAQSMRLPGDTSENQIKESNLWQTTVPYEKEQIREPKIKLKDIGKFKYFLQQQKVLNLLKYDPQHVWTKAELEEELYIGKHSYEVVRREMLLQKCHQLEKHILEQFRFDGSNHPRELEQGNHPNFKMYIVNGILTKRGELEIEAENWWLELGNSKNSLDKVEVELLTMKTIPEQKAFLLILIRNKFAHNQLPADNYFHYASNLMNLKKSDTYSLFWFTVADTIVQEFMSL

SEQ ID NO: 187 - protein, 1133 aa, Reichenbachiella agariperforans
MKTNPLIASSGEKPNYKKFNTESDKSFKKIFQNKGSIAPIAEKACKNFEIKSKSPVNRDGRLHYFSVGHAFKNIDSKNVFRYELDESQMDMKPTQFLALQKEFFDFQGALNGLLKHIRNVNSHYVHTFEKLEIQSINQKLITFLIEAFELAVIHSYLNEEELSYEAYKDDPQSGQKLVQFLCDKFYPNKEHEVEERKTILAKNKRQALEHLLFIEVTSDIDWKLFEKHKVFTISNGKYLSFHACLFLLSLFLYKSEANQLISKIKGFKRNDDNQYRSKRQIFTFFSKKFTSQDVNSEEQHLVKFRDVIQYLNHYPSAWNKHLELKSGYPQMTDKLMRYIVEAEIYRSFPDQTDNHRFLLFAIREFFGQSCLDTWTGNTPINFSNQEQKGFSYEINTSAEIKDIETKLKALVLKGPLNFKEKKEQNRLEKDLRREKKEQPTNRVKEKLLTRIQHNMLYVSYGRNQDRFMDFAARFLAETDYFGKDAKFKMYQFYTSDEQRDHLKEQKKELPKKEFEKLKYHQSKLVDYFTYAEQQARYPDWDTPFVVENNAIQIKVTLFNGAKKIVSVQRNLMLYLLEDALYSEKRENAGKGLISGYFVHHQKELKDQLDILEKETEISREQKREFKKLLPKRLLHRYSPAQINDTTEWNPMEVILEEAKAQEQRYQLLLEKAILHQTEEDFLKRNKGKQFKLRFVRKAWHLMYLKELYMNKVAEHGHHKSFHITKEEFNDFCRWMFAFDEVPKYKEYLCDYFSQKGFFNNAEFKDLIESSTSLNDLYEKTKQRFEGWSKDLTKQSDENKYLLANYESMLKDDMLYVNISHFISYLESKGKINRNAHGHIAYKALNNVPHLIEEYYYKDRLAPEEYKSHGKLYNKLKTVKLEDALLYEMAMHYLSLEPALVPKVKTKVKDILSSNIAFDIKDAAGHHLYHLLIPFHKIDSFVALINHQSQQEKDPDKTSFLAKIQPYLEKVKNSKDLKAVYHYYKDTPHTLRYEDLNMIHSHIVSQSVQFTKVALKLEEYFIAKKSITLQIARQISYSEIADLSNYFTDEVRNTAFHFDVPETAYSMILQGIESEFLDREIKPQKPKSLSELSTQQVSVCTAFLETLHNNLFDRKDDKKERLSKARERYFEQIN

SEQ ID NO: 188 - protein, 1115 aa, Fusobacterium necrophorum
MEKFRRQNRNSIIKIIISNYDTKGIKELKVRYRKQAQLDTFIIKTEIVNNDIFIKSIIEKAREKYRYSFLFDGEEKYHFKNKSSVEIVKKDIFSQTPDNMIRNYKITLKISEKNPRVVEAEIEDLMNSTILKDGRRSARREKSMTERKLIEEKVAKNYSLLANCPMEEVDSIKIYKIKRFLTYRSNMLLYFASINSFLCEGIKGKDNETEEIWHLKDNDVRKEKVRENFKNKLIQSTENYNSSLKNQIEEKEKLLRKEFKKGAFYRTIIKKLQQERIKELSEKSLTEDCEKIIKLYSKLRHSLMHYDYQYFENLFENKKNDDLMKDLNLDLFKSLPLIRKMKLNNKVNYLEDGDTLFVLQKTKKAKTLYQIYDALCEQKNGFNKFINDFFVSDGEENTVFKQIINEKFQSEMEFLEKRISESEKKNEKLKKKLDSMKAHFRNINSEDTKEAYFWDIHSSRNYKTKYNERKNLVNEYTELLGSSKEKKLLREEITKINRQLLKLKQEMEEITKKNSLFRLEYKMKIAFGFLFCEFDGNISKFKDEFDASNQEKIIQYHKNGEKYLTSFLKEEEKEKFNLEKMQKIIQKTEEEDWLLPETKNNLFKFYLLTYLLLPYELKGDFLGFVKKHYYDIKNVDFIDENQNNIQVSQTVEKQEDYFYHKIRLFEKNTKKYEIVKYSIVPNEKLKQYFEDLGIDIKYLTVEQKSEVSEEKNKKVSLKNNGMFNKTILLFVFKYYQIAFKLFNDIELYSLFFLREKSGKPLEIFRKELESKMKDGYLNFGQLLYVVYEVLVKNKDLDKILSKKIDYRKDKSFSPEIAYLRNFLSHLNYSKFLDNFMKINTNKSDENKEVLIPSIKIQKMIQFIEKCNLQNQIDFDFNFVNDFYMRKEKMFFIQLKQIFPDINSTEKQKMNEKEEILRNRYHLTDKKNEQIKDEHEAQSQLYEKILSLQKIYSSDKNNFYGRLKEEKLLFLEKQGKKKLSMEEIKDKIAGDISDLLGILKKEITRDIKDKLTEKFRYCEEKLLNLSFYNHQDKKKEESIRVFLIRDKNSDNFKFESILDDGSNKIFISKNGKEITIQCCDKVLETLIIEKNTLKISSNGKIISLIPHYSYSIDVKY

SEQ ID NO: 189 - protein, 1111 aa, Fusobacterium necrophorum
MEKFRRQNRSSIIKIIISNYDTKGIKELKVRYRKQAQLDTFIIKTEIVNNDIFIKSIIEKAREKYRYSFLFDGEEKYHFKNKSSVEIVKKDIFSQTPDNMIRNYKITLKISEKNPRVVEAEIEDLMNSTILKDGRRSARREKSMTERKLIEEKVAENYSLLANCPMEEVDSIKIYKIKRFLTYRSNMLLYFASINSFLCEGIKGKDNETEEIWHLKDNDVRKEKVKENFKNKLIQSTENYNSSLKNQIEEKEKLLRKESKKGAFYRTIIKKLQQERIKELSEKSLTEDCEKIIKLYSELRHPLMHYDYQYFENLFENKENSELTKNLNLDIFKSLPLVRKMKLNNKVNYLEDNDTLFVLQKTKKAKTLYQIYDALCEQKNGFNKFINDFFVSDGEENTVFKQIINEKFQSEIEFLEKRISESEKKNEKLKKKLDSMKAHFRNINSEDTKEAYFWDIHSSRNYKTKYNERKNLVNEYTELLGSSKEKKLLREEITKINRQLLKLKQEMEEITKKNSLFRLEYKMKMAFGFLFCEFDGNISRFKDEFDASNQEKIIQYHKNGEKYLTYFLKEEEKEKFNLKKLQETIQKTGEENWLLPQNKNNLFKFYLLTYLLLPYELKGDFLGFVKKHYYDIKNVDFMDENQSSKIIESKEDDFYHKIRLFEKNTKKYEIVKYSIVPDKKLKQYFKDLGIDTKYLILDQKSEVSGEKNKKVSLKNNGMFNKTILLFVFKYYQIAFKLFNDIELYSLFFLREKSGKPFEVFLKELKDKMIGKQLNFGQLLYVVYEVLVKNKDLSEILSERIDYRKDMCFSAEIADLRNFLSHLNYSKFLDNFMKINTNKSDENKEVLIPSIKIQKMIKFIEECNLQSQIDFDFNFVNDFYMRKEKMFFIQLKQIFPDINSTEKQKMNEKEEILRNRYHLTDKKNEQIKDEHEAQSQLYEKILSLQKIYSSDKNNFYGRLKEEKLLFLEKQEKKKLSMEEIKDKIAGDISDLLGILKKEITRDIKDKLTEKFRYCEEKLLNLSFYNHQDKKKEESIRVFLIRDKNSDNFKFESILDDGSNKIFISKNGKEITIQCCDKVLETLIIEKNTLKISSNGKIISLIPHYSYSIDVKY

SEQ ID NO: 190 - protein, 1110 aa, Fusobacterium necrophorum
MKVRYRKQAQLDTFIIKTEIVNNDIFIKSIIEKAREKYRYSFLFDGEEKYHFKNKSSVEIVKNDIFSQTPDNMIRNYKITLKISEKNPRVVEAEIEDLMNSTILKDGRRSARREKSMTERKLIEEKVAENYSLLANCPIEEVDSIKIYKIKRFLTYRSNMLLYFASINSFLCEGIKGKDNETEEIWHLKDNDVRKEKVKENFKNKLIQSTENYNSSLKNQIEEKEKLSSKEFKKGAFYRTIIKKLQQERIKELSEKSLTEDCEKIIKLYSELRHPLMHYDYQYFENLFENKENSELTKNLNLDIFKSLPLVRKMKLNNKVNYLEDNDTLFVLQKTKKAKTLYQIYDALCEQKNGFNKFINDFFVSDGEENTVFKQIINEKFQSEMEFLEKRISESEKKNEKLKKKLDSMKAHFRNINSEDTKEAYFWDIHSSRNYKTKYNERKNLVNEYTKLLGSSKEKKLLREEITKINRQLLKLKQEMEEITKKNSLFRLEYKMKIAFGFLFCEFDGNISKFKDEFDASNQEKIIQYHKNGEKYLTSFLKEEEKEKFNLEKMQKIIQKTEEEDWLLPETKNNLFKFYLLTYLLLPYELKGDFLGFVKKHYYDIKNVDFMDENQNNIQVSQTVEKQEDYFYHKIRLFEKNTKKYEIVKYSIVPNEKLKQYFEDLGIDIKYLTGSVESGEKWLGENLGIDIKYLTVEQKSEVSEEKNKKVSLKNNGMFNKTILLFVFKYYQIAFKLFNDIELYSLFFLREKSEKPFEVFLEELKDKMIGKQLNFGQLLYVVYEVLVKNKDLDKILSKKIDYRKDKSFSPEIAYLRNFLSHLNYSKFLDNFMKINTNKSDENKEVLIPSIKIQKMIQFIEKCNLQNQIDFDFNFVNDFYMRKEKMFFIQLKQIFPDINSTEKQKKSEKEEILRKRYHLINKKNEQIKDEHEAQSQLYEKILSLQKIFSCDKNNFYRRLKEEKLLFLEKQGKKKISMKEIKDKIASDISDLLGILKKEITRDIKDKLTEKFRYCEEKLLNISFYNHQDKKKEEGIRVFLIRDKNSDNFKFESILDDGSNKIFISKNGKEITIQCCDKVLETLMIEKNTLKISSNGKIISLIPHYSYSIDVKY

SEQ ID NO: 191 - protein, 668 aa, Fusobacterium necrophorum
MTEKKSIIFKNKSSVEIVKKDIFSQTPDNMIRNYKITLKISEKNPRVVEAEIEDLMNSTILKDGRRSARREKSMTERKLIEEKVAENYSLLANCPMEEVDSIKIYKIKRFLTYRSNMLLYFASINSFLCEGIKGKDNETEEIWHLKDNDVRKEKVKENFKNKLIQSTENYNSSLKNQIEEKEKLLRKESKKGAFYRTIIKKLQQERIKELSEKSLTEDCEKIIKLYSELRHPLMHYDYQYFENLFENKENSELTKNLNLDIFKSLPLVRKMKLNNKVNYLEDNDTLFVLQKTKKAKTLYQIYDALCEQKNGFNKFINDFFVSDGEENTVFKQIINEKFQSEMEFLEKRISESEKKNEKLKKKFDSMKAHFHNINSEDTKEAYFWDIHSSSNYKTKYNERKNLVNEYTELLGSSKEKKLLREEITQINRKLLKLKQEMEEITKKNSLFRLEYKMKIAFGFLFCEFDGNISKFKDEFDASNQEKIIQYHKNGEKYLTYFLKEEEKEKFNLEKMQKIIQKTEEEDWLLPETKNNLFKFYLLTYLLLPYELKGDFLGFVKKHYYDIKNVDFMDENQNNIQVSQTVEKQEDYFYHKIRLFEKNTKKYEIVKYSIVPNEKLKQYFEDLGIDIKYLTGSVESGEKWLGENLGIDIKYLTVEQKSEVSEEKIKKFL

SEQ ID NO: 192 - protein, 1121 aa, Fusobacterium necrophorum
MGKPNRSSIIKIIISNYDNKGIKEVKVRYNKQAQLDTFLIKSELKDGKFILYSIVDKAREKYRYSFEIDKTNINKNEILIIKKDIYSNKEDKVIRKYILSFEVSEKNDRTIVTKIKDCLETQKKEKFERENTRRLISETERKLLSEETQKTYSKIACCSPEDIDSVKIYKIKRYLAYRSNMLLFFSLINDIFVKGVVKDNGEEVGEIWRIIDSKEIDEKKTYDLLVENFKKRMSQEFINYKQSIENKIEKNTNKIKEIEQKLKKEKYKKEINRLKKQLIELNRENDLLEKDKIELSDEEIREDIEKILKIYSDLRHKLMHYNYQYFENLFENKKISKEKNEDVNLTELLDLNLFRYLPLVRQLKLENKTNYLEKEDKITVLGVSDSAIKYYSYYNFLCEQKNGFNNFINSFFSNDGEENKSFKEKINLSLEKEIEIMEKETNEKIKEINKNELQLMKEQKELGTAYVLDIHSLNDYKISHNERNKNVKLQNDIMNGNRDKNALDKINKKLVELKIKMDKITKRNSILRLKYKLQVAYGFLMEEYKGNIKKFKDEFDISKEKIKSYKSKGEKYLEVKSEKKYITKILNSIEDIHNITWLKNQEENNLFKFYVLTYILLPFEFRGDFLGFVKKHYYDIKNVEFLDENNDRLTPEQLEKMKNDSFFNKIRLFEKNSKKYDILKESILTSERIGKYFSLLNTGAKYFEYGGEENRGIFNKNIIIPIFKYYQIVLKLYNDVELAMLLTLSESDEKDINKIKELVTLKEKVSPKKIDYEKKYKFSVLLDCFNRIINLGKKDFLASEEVKEVAKTFTNLAYLRNKICHLNYSKFIDDLLTIDTNKSTTDSEGKLLINDRIRKLIKFIRENNQKMNISIDYNYINDYYMKKEKFIFGQRKQAKTIIDSGKKANKRNKAEELLKMYRVKKENINLIYELSKKLNELTKSELFLLDKKLLKDIDFTDVKIKNKSFFELKNDVKEVANIKQALQKHSSELIGIYKKEVIMAIKRSIVSKLIYDEEKVLSIIIYDKTNKKYEDFLLEIRRERDINKFQFLIDEKKEKLGYEKIIETKEKKKVVVKIQNNSELVSEPRIIKNKDKKKAKTPEEISKLGILDLTNHYCFNLKITL

SEQ ID NO: 193 - protein, 897 aa, Fusobacterium necrophorum
MENKGNNKKIDFDENYNILVAQIKEYFTKEIENYNNRIDNIIDKKELLKYSEKKEESEKNKKLEELNKLKSQKLKILTDEEIKADVIKIIKIFSDLRHSLMHYEYKYFENLFENKKNEELAELLNLNLFKNLTLLRQMKIENKTNYLEGREEFNIIGKNIKAKEVLGHYNLLAEQKNGFNNFINSFFVQDGTENLEFKKLIDEHFVNAKKRLERNIKKSKKLEKELEKMEQHYQRLNCAYVWDIHTSTTYKKLYNKRKSLIEEYNKQINEIKDKEVITAINVELLRIKKEMEEITKSNSLFRLKYKMQIAYAFLEIEFGGNIAKFKDEFDCSKMEEVQKYLKKGVKYLKYYKDKEAQKNYEFPFEEIFENKDTHNEEWLENTSENNLFKFYILTYLLLPMEFKGDFLGVVKKHYYDIKNVDFTDESEKELSQVQLDKMIGDSFFHKIRLFEKNTKRYEIIKYSILTSDEIKRYFRLLELDVPYFEYEKGTDEIGIFNKNIILTIFKYYQIIFRLYNDLEIHGLFNISSDLDKILRDLKSYGNKNINFREFLYVIKQNNNSSTEEEYRKIWENLEAKYLRLHLLTPEKEEIKTKTKEELEKLNEISNLRNGICHLNYKEIIEEILKTEISEKNKEATLNEKIRKVINFIKENELDKVELGFNFINDFFMKKEQFMFGQIKQVKEGNSDSITTERERKEKNNKKLKETYELNCDNLSEFYETSNNLRERANSSSLLEDSAFLKKIGLYKVKNNKVNSKVKDEEKRIENIKRKLLKDSSDIMGMYKAEVVKKLKEKLILIFKHDEEKRIYVTVYDTSKAVPENISKEILVKRNNSKEEYFFEDNNKKYVTEYYTLEITETNELKVIPAKKLEGKEFKTEKNKENKLMLNNHYCFNVKIIY

SEQ ID NO: 194 - protein, 1111 aa, Fusobacterium necrophorum
MKSGRREKAKSNKSSIVRVIISNFDDKQVKEIKVLYTKQGGIDVIKFKSTEKDEKGRMKFNFDCAYNRLEEEEFNSFGGKGKQSFFVTTNEDLTELHVTKRHKTTGEIIKDYTIQGKYTPIKQDRTKVTVSITDNKDHFDSNDLGDKIRLSRSLTQYTNRILLDADVMKNYREIVCSDSEKVDETINIDSQEIYKINRFLSYRSNMIIYYQMINNFLLHYDGEEDKGGNDSINLINEIWKYENKKNDEKEKIIERSYKSIEKSINQYILNHNTEVESGDKEKKIDISEERIKEDLKKTFILFSRLRHYMVHYNYKFYENLYSGKNFIIYNKDKSKSRRFSELLDLNIFKELSKIKLVKNRAVSNYLDKKTTIHVLNKNINAIKLLDIYRDICETKNGFNNFINNMMTISGEEDKEYKEMVTKHFNENMNKLSIYLENFKKHSDFKTNNKKKETYNLLKQELDEQKKLRLWFNAPYVYDIHSSKKYKELYVERKKYVDIHSKLIEAGINNDNKKKLNEINVKLCELNTEMKEMTKLNSKYRLQYKLQLAFGFILEEFNLDIDKFVSAFDKDNNLTISKFMEKRETYLSKSLDRRDNRFKKLIKDYKFRDTEDIFCSDRENNLVKLYILMYILLPVEIRGDFLGFVKKNYYDLKHVDFIDKRNNDNKDTFFHDLRLFEKNVKRLEVTSYSLSDGFLGKKSREKFGKELEKFIYKNVSIALPTNIDIKEFNKSLVLPMMKNYQIIFKLLNDIEISALFLIAKKEGNEGSITFKKVIDKVRKEDMNGNINFSQVMKMALNEKVNCQIRNSIAHINMKQLYIEPLNIYINNNQNKKTISEQMEEIIDICITKGLTGKELNKNIINDYYMKKEKLVFNLKLRKRNNLVSIDAQQKNMKEKSILNKYDLNYKDENLNIKEIILKVNDLNNKQKLLKETTEGESNYKNALSKDILLLNGIIRKNINFKIKEMILGIIQQNEYRYVNINIYDKIRKEDHNIDLKINNKYIEISCYENKSNESTDERINFKIKYMDLKVKNELLVPSCYEDIYIKKKIDLEIRYIENCKVVYIDIYYKKYNINLEFDGKTLFVKFNKDVKKNNQKVNLESNYIQNIKFIVS

SEQ ID NO: 195 - protein, 199 aa, Homo sapiens
MEASPASGPRHLMDPHIFTSNFNNGIGRHKTYLCYEVERLDNGTSVKMDQHRGFLHNQAKNLLCGFYGRHAELRFLDLVPSLQLDPAQIYRVTWFISWSPCFSWGCAGEVRAFLQENTHVRLRIFAARIYDYDPLYKEALQMLRDAGAQVSIMTYDEFKHCWDTFVDHQGCPFQPWDGLDEHSQALSGRLRAILQNQGN

SEQ ID NO: 196 - protein, 384 aa, Homo sapiens
MKPHFRNTVERMYRDTFSYNFYNRPILSRRNTVWLCYEVKTKGPSRPPLDAKIFRGQVYSELKYHPEMRFFHWFSKWRKLHRDQEYEVTWYISWSPCTKCTRDMATFLAEDPKVTLTIFVARLYYFWDPDYQEALRSLCQKRDGPRATMKIMNYDEFQHCWSKFVYSQRELFEPWNNLPKYYILLHIMLGEILRHSMDPPTFTFNFNNEPWVRGRHETYLCYEVERMHNDTWVLLNQRRGFLCNQAPHKHGFLEGRHAELCFLDVIPFWKLDLDQDYRVTCFTSWSPCFSCAQEMAKFISKNKHVSLCIFTARIYDDQGRCQEGLRTLAEAGAKISIMTYSEFKHCWDTFVDHQGCPFQPWDGLDEHSQDLSGRLRAILQNQEN

SEQ ID NO: 197 - protein, 236 aa, Homo sapiens; identical to SEQ ID NO: 43

SEQ ID NO: 198 - protein, 198 aa, Homo sapiens [sequence omitted]

SEQ ID NO: 199 - protein, 229 aa, Homo sapiens
MSSETGPVAVDPTLRRRIEPHEFEVFFDPRELRKETCLLYEINWGGRHSVWRHTSQNTSNHVEVNFLEKFTTERYFRPNTRCSITWFLSWSPCGECSRAITEFLSRHPYVTLFIYIARLYHHTDQRNRQGLRDLISSGVTIQIMTEQEYCYCWRNFVNYPPSNEAYWPRYPHLWVKLYVLELYCIILGLPPCLKILRRKQPQLTFFTITLQTCHYQRIPPHLLWATGLK

SEQ ID NO: 200 - protein, 229 aa, Artificial Sequences [sequence omitted]

SEQ ID NO: 201 - DNA, 30 bp, Artificial Sequences
  Synthetic
ctctttgtcgccttcgtaggtgtggcagcg

SEQ ID NO: 202 - DNA, 30 bp, Artificial Sequences
  Synthetic
gtcgccttcgtaggtgtggcagcgtcctgg

SEQ ID NO: 203 - DNA, 30 bp, Artificial Sequences
  Synthetic
ttcgtaggtgtggcagcgtcctgggatgaa

SEQ ID NO: 204 - DNA, 30 bp, Artificial Sequences
  Synthetic
ggtgtggcagcgtcctgggatgaacttctt

SEQ ID NO: 205 - DNA, 30 bp, Artificial Sequences
  Synthetic
gcagcgtcctgggatgaacttcttcatctt

SEQ ID NO: 206 - DNA, 30 bp, Artificial Sequences
  Synthetic
tcctgggatgaacttcttcatcttgggcgt

SEQ ID NO: 207 - DNA, 30 bp, Artificial Sequences
  Synthetic
gatgaacttcttcatcttgggcgtgcgctt

SEQ ID NO: 208 - DNA, 30 bp, Artificial Sequences
  Synthetic
cttcttcatcttgggcgtgcgcttgatgtg

SEQ ID NO: 209 - DNA, 30 bp, Artificial Sequences
  Synthetic
catcttgggcgtgcgcttgatgtgggacag

SEQ ID NO: 210 - DNA, 30 bp, Artificial Sequences
  Synthetic
gggcgtgcgcttgatgtgggacaggcagat

SEQ ID NO: 211 - DNA, 30 bp, Artificial Sequences
  Synthetic
gcgcttgatgtgggacaggcagatcagaca

SEQ ID NO: 212 - DNA, 30 bp, Artificial Sequences
  Synthetic
gatgtgggacaggcagatcagacagcccct

SEQ ID NO: 213 - DNA, 30 bp, Artificial Sequences
  Synthetic
ggacaggcagatcagacagcccctggtgca

SEQ ID NO: 214 - DNA, 30 bp, Artificial Sequences
  Synthetic
gcagatcagacagcccctggtgcagccagc

SEQ ID NO: 215 - DNA, 30 bp, Artificial Sequences
  Synthetic
cagacagcccctggtgcagccagctttccg

SEQ ID NO: 216 - DNA, 30 bp, Artificial Sequences
  Synthetic
gtaatgcctggcttgtcgacgcatagtctg

SEQ ID NO: 217 - DNA, 31 bp, Artificial Sequences
  Synthetic
gctctttgtcgccttcgtaggtgtggcagcg

SEQ ID NO: 218 - DNA, 31 bp, Artificial Sequences
  Synthetic
ggtcgccttcgtaggtgtggcagcgtcctgg

SEQ ID NO: 219 - DNA, 31 bp, Artificial Sequences
  Synthetic
gttcgtaggtgtggcagcgtcctgggatgaa

SEQ ID NO: 220 - DNA, 31 bp, Artificial Sequences
  Synthetic
gggtgtggcagcgtcctgggatgaacttctt

SEQ ID NO: 221 - DNA, 31 bp, Artificial Sequences
  Synthetic
ggcagcgtcctgggatgaacttcttcatctt

SEQ ID NO: 222 - DNA, 31 bp, Artificial Sequences
  Synthetic
gtcctgggatgaacttcttcatcttgggcgt

SEQ ID NO: 223 - DNA, 31 bp, Artificial Sequences
  Synthetic
ggatgaacttcttcatcttgggcgtgcgctt

SEQ ID NO: 224 - DNA, 31 bp, Artificial Sequences
  Synthetic
gcttcttcatcttgggcgtgcgcttgatgtg

SEQ ID NO: 225 - DNA, 31 bp, Artificial Sequences
  Synthetic
gcatcttgggcgtgcgcttgatgtgggacag

SEQ ID NO: 226 - DNA, 31 bp, Artificial Sequences
  Synthetic
ggggcgtgcgcttgatgtgggacaggcagat

SEQ ID NO: 227 - DNA, 31 bp, Artificial Sequences
  Synthetic
ggcgcttgatgtgggacaggcagatcagaca

SEQ ID NO: 228 - DNA, 31 bp, Artificial Sequences
  Synthetic
ggatgtgggacaggcagatcagacagcccct

SEQ ID NO: 229 - DNA, 31 bp, Artificial Sequences
  Synthetic
gggacaggcagatcagacagcccctggtgca

SEQ ID NO: 230 - DNA, 31 bp, Artificial Sequences
  Synthetic
ggcagatcagacagcccctggtgcagccagc

SEQ ID NO: 231 - DNA, 31 bp, Artificial Sequences
  Synthetic
gcagacagcccctggtgcagccagctttccg

SEQ ID NO: 232 - DNA, 31 bp, Artificial Sequences
  Synthetic
ggtaatgcctggcttgtcgacgcatagtctg

SEQ ID NO: 233 - DNA, 31 bp, Artificial Sequences
  Synthetic
cgctgccacacctacgaaggcgacaaagagc

SEQ ID NO: 234 - DNA, 31 bp, Artificial Sequences
  Synthetic
ccaggacgctgccacacctacgaaggcgacc

SEQ ID NO: 235 - DNA, 31 bp, Artificial Sequences
  Synthetic
ttcatcccaggacgctgccacacctacgaac

SEQ ID NO: 236 - DNA, 31 bp, Artificial Sequences
  Synthetic
aagaagttcatcccaggacgctgccacaccc

SEQ ID NO: 237 - DNA, 31 bp, Artificial Sequences
  Synthetic
aagatgaagaagttcatcccaggacgctgcc

SEQ ID NO: 238 - DNA, 31 bp, Artificial Sequences
  Synthetic
acgcccaagatgaagaagttcatcccaggac

SEQ ID NO: 239 - DNA, 31 bp, Artificial Sequences
  Synthetic
aagcgcacgcccaagatgaagaagttcatcc

SEQ ID NO: 240 - DNA, 31 bp, Artificial Sequences
  Synthetic
cacatcaagcgcacgcccaagatgaagaagc

SEQ ID NO: 241 - DNA, 31 bp, Artificial Sequences
  Synthetic
ctgtcccacatcaagcgcacgcccaagatgc

SEQ ID NO: 242 - DNA, 31 bp, Artificial Sequences
  Synthetic
atctgcctgtcccacatcaagcgcacgcccc

SEQ ID NO: 243 - DNA, 31 bp, Artificial Sequences
  Synthetic
tgtctgatctgcctgtcccacatcaagcgcc

SEQ ID NO: 244 - DNA, 31 bp, Artificial Sequences
  Synthetic
aggggctgtctgatctgcctgtcccacatcc

SEQ ID NO: 245 - DNA, 31 bp, Artificial Sequences
  Synthetic
tgcaccaggggctgtctgatctgcctgtccc

SEQ ID NO: 246 - DNA, 31 bp, Artificial Sequences
  Synthetic
gctggctgcaccaggggctgtctgatctgcc

SEQ ID NO: 247 - DNA, 31 bp, Artificial Sequences
  Synthetic
cggaaagctggctgcaccaggggctgtctgc

SEQ ID NO: 248 - DNA, 31 bp, Artificial Sequences
  Synthetic
cagactatgcgtcgacaagccaggcattacc

SEQ ID NO: 249 - DNA, 35 bp, Artificial Sequences
  Synthetic
caccgctctttgtcgccttcgtaggtgtggcagcg

SEQ ID NO: 250 - DNA, 35 bp, Artificial Sequences
  Synthetic
caccggtcgccttcgtaggtgtggcagcgtcctgg

SEQ ID NO: 251 - DNA, 35 bp, Artificial Sequences
  Synthetic
caccgttcgtaggtgtggcagcgtcctgggatgaa

SEQ ID NO: 252 - DNA, 35 bp, Artificial Sequences
  Synthetic
caccgggtgtggcagcgtcctgggatgaacttctt

SEQ ID NO: 253 - DNA, 35 bp, Artificial Sequences
  Synthetic
caccggcagcgtcctgggatgaacttcttcatctt

SEQ ID NO: 254 - DNA, 35 bp, Artificial Sequences
  Synthetic
caccgtcctgggatgaacttcttcatcttgggcgt

SEQ ID NO: 255 - DNA, 35 bp, Artificial Sequences
  Synthetic
caccggatgaacttcttcatcttgggcgtgcgctt

SEQ ID NO: 256 - DNA, 35 bp, Artificial Sequences
  Synthetic
caccgcttcttcatcttgggcgtgcgcttgatgtg

SEQ ID NO: 257 - DNA, 35 bp, Artificial Sequences
  Synthetic
caccgcatcttgggcgtgcgcttgatgtgggacag

SEQ ID NO: 258 - DNA, 35 bp, Artificial Sequences
  Synthetic
caccggggcgtgcgcttgatgtgggacaggcagat

SEQ ID NO: 259 - DNA, 35 bp, Artificial Sequences
  Synthetic
caccggcgcttgatgtgggacaggcagatcagaca

SEQ ID NO: 260 - DNA, 35 bp, Artificial Sequences
  Synthetic
caccggatgtgggacaggcagatcagacagcccct

SEQ ID NO: 261 - DNA, 35 bp, Artificial Sequences
  Synthetic
caccgggacaggcagatcagacagcccctggtgca

SEQ ID NO: 262 - DNA, 35 bp, Artificial Sequences
  Synthetic
caccggcagatcagacagcccctggtgcagccagc

SEQ ID NO: 263 - DNA, 35 bp, Artificial Sequences
  Synthetic
caccgcagacagcccctggtgcagccagctttccg

SEQ ID NO: 264 - DNA, 35 bp, Artificial Sequences
  Synthetic
caccggtaatgcctggcttgtcgacgcatagtctg

SEQ ID NO: 265 - DNA, 35 bp, Artificial Sequences
  Synthetic
caaccgctgccacacctacgaaggcgacaaagagc

SEQ ID NO: 266 - DNA, 35 bp, Artificial Sequences
  Synthetic
caacccaggacgctgccacacctacgaaggcgacc

SEQ ID NO: 267 - DNA, 35 bp, Artificial Sequences
  Synthetic
caacttcatcccaggacgctgccacacctacgaac

SEQ ID NO: 268 - DNA, 35 bp, Artificial Sequences
  Synthetic
caacaagaagttcatcccaggacgctgccacaccc

SEQ ID NO: 269 - DNA, 35 bp, Artificial Sequences
  Synthetic
caacaagatgaagaagttcatcccaggacgctgcc

SEQ ID NO: 270 - DNA, 35 bp, Artificial Sequences
  Synthetic
caacacgcccaagatgaagaagttcatcccaggac

SEQ ID NO: 271 - DNA, 35 bp, Artificial Sequences
  Synthetic
caacaagcgcacgcccaagatgaagaagttcatcc

SEQ ID NO: 272 - DNA, 35 bp, Artificial Sequences
  Synthetic
caaccacatcaagcgcacgcccaagatgaagaagc

SEQ ID NO: 273 - DNA, 35 bp, Artificial Sequences
  Synthetic
caacctgtcccacatcaagcgcacgcccaagatgc

SEQ ID NO: 274 - DNA, 35 bp, Artificial Sequences
  Synthetic
caacatctgcctgtcccacatcaagcgcacgcccc

SEQ ID NO: 275 - DNA, 35 bp, Artificial Sequence
  Synthetic
caactgtctgatctgcctgtcccacatcaagcgcc

SEQ ID NO: 276 - DNA, 35 bp, Artificial Sequences
  Synthetic
caacaggggctgtctgatctgcctgtcccacatcc

SEQ ID NO: 277 - DNA, 35 bp, Artificial Sequences
  Synthetic
caactgcaccaggggctgtctgatctgcctgtccc

SEQ ID NO: 278 - DNA, 35 bp, Artificial Sequences
  Synthetic
caacgctggctgcaccaggggctgtctgatctgcc

SEQ ID NO: 279 - DNA, 35 bp, Artificial Sequences
  Synthetic
caaccggaaagctggctgcaccaggggctgtctgc

SEQ ID NO: 280 - DNA, 35 bp, Artificial Sequences
  Synthetic
caaccagactatgcgtcgacaagccaggcattacc

SEQ ID NO: 281 - DNA, 35 bp, Artificial Sequences; identical to SEQ ID NO: 249
  Synthetic

SEQ ID NO: 282 - DNA, 35 bp, Artificial Sequences; identical to SEQ ID NO: 250
  Synthetic

SEQ ID NO: 283 - DNA, 35 bp, Artificial Sequences; identical to SEQ ID NO: 251
  Synthetic

SEQ ID NO: 284 - DNA, 35 bp, Artificial Sequences; identical to SEQ ID NO: 252
  Synthetic

SEQ ID NO: 285 - DNA, 35 bp, Artificial Sequences; identical to SEQ ID NO: 253
  Synthetic

SEQ ID NO: 286 - DNA, 35 bp, Artificial Sequences; identical to SEQ ID NO: 254
  Synthetic

SEQ ID NO: 287 - DNA, 35 bp, Artificial Sequences; identical to SEQ ID NO: 255
  Synthetic

SEQ ID NO: 288 - DNA, 35 bp, Artificial Sequences; identical to SEQ ID NO: 256
  Synthetic

SEQ ID NO: 289 - DNA, 35 bp, Artificial Sequences; identical to SEQ ID NO: 257
  Synthetic

SEQ ID NO: 290 - DNA, 35 bp, Artificial Sequences; identical to SEQ ID NO: 258
  Synthetic

SEQ ID NO: 291 - DNA, 35 bp, Artificial Sequences; identical to SEQ ID NO: 259
  Synthetic

SEQ ID NO: 292 - DNA, 35 bp, Artificial Sequences; identical to SEQ ID NO: 260
  Synthetic

SEQ ID NO: 293 - DNA, 35 bp, Artificial Sequences; identical to SEQ ID NO: 261
  Synthetic

SEQ ID NO: 294 - DNA, 35 bp, Artificial Sequences; identical to SEQ ID NO: 262
  Synthetic

SEQ ID NO: 295 - DNA, 35 bp, Artificial Sequences; identical to SEQ ID NO: 263
  Synthetic

SEQ ID NO: 296 - DNA, 35 bp, Artificial Sequences; identical to SEQ ID NO: 264
  Synthetic

SEQ ID NO: 297 - DNA, 35 bp, Artificial Sequences; identical to SEQ ID NO: 265
  Synthetic

SEQ ID NO: 298 - DNA, 35 bp, Artificial Sequences; identical to SEQ ID NO: 266
  Synthetic

SEQ ID NO: 299 - DNA, 35 bp, Artificial Sequences; identical to SEQ ID NO: 267
  Synthetic

SEQ ID NO: 300 - DNA, 35 bp, Artificial Sequences; identical to SEQ ID NO: 268
  Synthetic

SEQ ID NO: 301 - DNA, 35 bp, Artificial Sequences; identical to SEQ ID NO: 269
  Synthetic

SEQ ID NO: 302 - DNA, 35 bp, Artificial Sequences; identical to SEQ ID NO: 270
  Synthetic

SEQ ID NO: 303 - DNA, 35 bp, Artificial Sequences; identical to SEQ ID NO: 271
  Synthetic

SEQ ID NO: 304 - DNA, 35 bp, Artificial Sequences; identical to SEQ ID NO: 272
  Synthetic

SEQ ID NO: 305 - DNA, 35 bp, Artificial Sequences; identical to SEQ ID NO: 273
  Synthetic

SEQ ID NO: 306 - DNA, 35 bp, Artificial Sequences; identical to SEQ ID NO: 274
  Synthetic

SEQ ID NO: 307 - DNA, 35 bp, Artificial Sequences; identical to SEQ ID NO: 275
  Synthetic

SEQ ID NO: 308 - DNA, 35 bp, Artificial Sequences; identical to SEQ ID NO: 276
  Synthetic

SEQ ID NO: 309 - DNA, 35 bp, Artificial Sequences; identical to SEQ ID NO: 277
  Synthetic

SEQ ID NO: 310 - DNA, 35 bp, Artificial Sequences; identical to SEQ ID NO: 278
  Synthetic

SEQ ID NO: 311 - DNA, 35 bp, Artificial Sequences; identical to SEQ ID NO: 279
  Synthetic

SEQ ID NO: 312 - DNA, 35 bp, Artificial Sequences; identical to SEQ ID NO: 280
  Synthetic
